(19) United States
(12) Patent Application Publication
(10) Pub. No.: US 2025/0320473 A1
(43) Pub. Date: Oct. 16, 2025

(54) CHIMERA DNA POLYMERASE AND PREPARATION METHOD THEREFOR

(71) Applicant: WUHAN ABCLONAL BIOTECHNOLOGY CO., LTD., Wuhan (CN)

(72) Inventors: Yanye Feng, Wuhan (CN); Zhi Chai, Wuhan (CN); Jie Feng, Wuhan (CN); Shaohui Liu, Wuhan (CN); Dapeng Sun, Wuhan (CN); Xuhui Lai, Wuhan (CN)

(73) Assignee: WUHAN ABCLONAL BIOTECHNOLOGY CO., LTD., Wuhan, HB (CN)

(21) Appl. No.: 18/694,872

(22) PCT Filed: Feb. 16, 2022
(86) PCT No.: PCT/CN2022/071597

§ 371 Date: Mar. 22, 2024

(30) Foreign Application Priority Data
Sep. 23, 2021 (CN) 202111114932.5

(51) Int. Cl. C12N 9/12; C12P 19/34

(52) U.S. Cl. CPC C12N 9/1252; C12P 19/34; C07K 2319/80; C12Y 207/07007

(57) ABSTRACT

A chimera DNA polymerase and a preparation method therefor. The chimera DNA polymerase contains 2-8 (for example 3) domains or segments derived from different polymerases. The chimera DNA polymerase has improved properties such as a better extension characteristic, a better DNA binding characteristic, a better corrective activity, a better fidelity, a higher amplification speed, a better tolerance to an inhibitor, and a higher long fragment amplification capability.

### CROSS-REFERENCE TO RELATED APPLICATIONS

[0001] This application claims priority to CN patent application Ser. No. 202111114932.5, filed on Sep. 23, 2021, and entitled “CHIMERA DNA POLYMERASE AND PREPARATION METHOD THEREFOR”, which is incorporated herein by reference in its entirety.

### REFERENCE TO SEQUENCE LISTING

[0002] A Sequence Listing is provided as a file titled PD210083PCT-US_sequence_list.txt created Apr. 25, 2025, which is approximately 1,819 KB in size, and which includes an English language translation of the Sequence Listing originally submitted with the present application. The material in this file is incorporated herein by reference in its entirety.

### TECHNICAL FIELD

[0003] This application relates to the field of enzyme engineering. Specifically, this application relates to a chimera polymerase and a preparation method and use therefor.

### BACKGROUND

[0004] A polymerase is a collective name of a type of enzymes that specifically biologically catalyze syntheses of deoxyribonucleic acid (DNA) and ribonucleic acid (RNA). In 1957, American scientist Arthur Kornberg discovered a DNA polymerase in Escherichia coli for the first time. The enzyme was named DNA polymerase I. In 1970, German scientist Rolf Knippers discovered DNA polymerase II. Subsequently, DNA polymerase III was discovered.

[0005] As one of important factors in the polymerase chain reaction (PCR), DNA polymerase has a crucial function in the PCR process. A PCR technology is a technology of a thermostable DNA polymerase in a sense. Thermostable DNA polymerases that have been discovered all belong to family A or family B. DNA polymerases belonging to the family A are all derived from eubacteria, for example, Taq, Tth, Tca (T. caldophilus), Tfl, and Tfl derived from Thermus genus, and Bst derived from Bacillus genus; and thermostable DNA polymerases belonging to the family B are all derived from archaea, for example, Tli derived from Thermococcus genus, and Pfu and KOD derived from Pyrococcus genus, and the like.

[0006] Since the advent of the PCR technology, people have been continuously looking for DNA polymerases with good enzymatic properties and high fidelity for use in the PCR. After Taq DNA polymerase, thermostable DNA polymerases with proofreading functions such as Deep Vent, Pfu, Tgo, and KOD were successively discovered.

[0007] As a technology for amplifying specific DNA fragments in vitro rapidly, the polymerase chain reaction (PCR) is a DNA polymerase-catalyzed reaction for amplifying DNA fragments defined by a pair of oligonucleotide primers in a reaction mixture consisting of DNA templates, primers, dNTPs, appropriate buffers, and the like. In this process, the DNA polymerase has a crucial function. Development and utilization of enzymes is one of important contents of modern biotechnologies. Using the technologies to modify and design enzyme genes is one of important means of biological enzyme engineering.

### SUMMARY

[0008] This application provides a chimera DNA polymerase with high fidelity. The chimera DNA

[0009] polymerase in this application may further have improved properties such as processivity, DNA binding activity, proofreading activity, fidelity, amplification speed, the tolerance to inhibitors, and long fragment amplification capability.

### DNA Polymerase

[0010] The chimera DNA polymerase in this application may contain 2-8 (for example, 3) domains or segments derived from different polymerases. The domains or segments include, but are not limited to, an exonuclease domain (generally referring to an N-terminal region), a thumb domain, a palm structure, and a finger domain. The domains or segments can be derived from different DNA polymerases, including but are not limited to: Pfu polymerase, KOD polymerase, 9N polymerase, T4 polymerase, and phi29 polymerase. The polymerases can be derived from various thermophilic bacteria, including, but not limited to, Thermotoga sp, Thermococcus profundus, Thermococcus gammatolerans, Thermococcus radiotolerans, Pyrococuus sp.NA2, Thermococcus celericrescens, Pyrococcus glycovorans, and Pyrococcus furiosus. An identity between the chimera DNA polymerases in this application can be more than 80%.

[0011] In some embodiments, a chimera DNA polymerase with DNA replication activity is provided, including:
[0012] a first domain, encoded by a nucleotide sequence selected from nucleotide sequences denoted as SEQ ID NOs: 576 to 583 or a nucleotide sequence that shares a sequence identity of at least 70%, 75%, 80%, 85%, 90%, 95%, 97%, 98% or 99% with one of the nucleotide sequences denoted as SEQ ID NOs: 576 to 583;
[0013] a second domain, encoded by a nucleotide sequence selected from nucleotide sequences denoted as SEQ ID NOs: 584 to 591 or a nucleotide sequence that shares a sequence identity of at least 70%, 75%, 80%, 85%, 90%, 95%, 97%, 98% or 99% with one of the nucleotide sequences denoted as SEQ ID NOs: 584 to 591; and
[0014] a third domain, encoded by a nucleotide sequence selected from nucleotide sequences denoted as SEQ ID NOs: 592 to 599 or a nucleotide sequence that shares a sequence identity of at least 70%, 75%, 80%, 85%, 90%, 95%, 97%, 98% or 99% with one of the nucleotide sequences denoted as SEQ ID NOs: 592 to 599.

[0015] More specifically, nucleotide sequences denoted as SEQ ID NOs: 576 to 599 are respectively derived from eight source species: Thermococcus profundus (Thermococcus profundus), Thermococcus gammatolerans (Thermococcus gammatolerans), Thermococcus radiotolerans (Thermococcus radiotolerans), Pyrococcus sp. NA2 (Pyrococcus sp. NA2), Thermococcus celericrescens (Thermococcus celericrescens), Pyrococcus glycovorans (Pyrococcus glycovorans), and Pyrococcus furiosus (Pyrococcus furiosus). The first domain encoded by a nucleotide sequence selected from the nucleotide sequences denoted as SEQ ID NOs: 576 to 583 is the N-terminal domain, which is mainly involved in a proofreading or exonucleation function of 3′-5′ exonuclease activity; and the second domain encoded by a nucleotide sequence selected from the nucleotide sequences denoted as SEQ ID NOs: 584 to 591 is the finger and palm domains. The finger domain or the palm domain is mainly responsible for binding and incorporation of dNTPs and is an active center of the enzyme. The third domain encoded by a nucleotide sequence selected from the nucleotide sequences denoted as SEQ ID NOs: 592 to 599 is the thumb domain, which is mainly related to a capability of processivity. There is no absolute cleavage among the three regions. Conservative cleavage and combination are carried out based on structure and sequence characteristics to construct diversity of an enzyme library.

[0016] In some more specific embodiments, a combined polymerase with the first domain of SEQ ID NO: 583 or 581, the second domain of SEQ ID NO: 586 or 591, and the third domain of SEQ ID NO: 596 or 598 has a good processivity; and a combined polymerase with the first domain of SEQ ID NO: 578 or 582, the second domain of SEQ ID NO: 586 or 590, and the third domain of SEQ ID NO: 592, 593, or 594 has a greater extension rate.

[0017] In some embodiments, the chimera DNA polymerase in this application includes a first domain encoded by a nucleotide sequence selected from nucleotide sequences denoted as SEQ ID NOs: 576 to 583, a second domain encoded by a nucleotide sequence selected from nucleotide sequences denoted as SEQ ID NOs: 584 to 591, and the third domain encoded by a nucleotide sequence selected from nucleotide sequences denoted as SEQ ID NOs: 592 to 599, or consists of the foregoing first domain, second domain, and third domain.

[0018] In some other embodiments, the chimera DNA polymerase including the foregoing first domain, second domain and third domain in this application further contains or has one or more amino acid substitutions. For example, the amino acid substitution may be selected from one or more amino acid substitutions corresponding to amino acids at the following positions: 5, 6, 11, 15, 16, 18, 22, 24, 25, 28, 30, 33, 35, 36, 38, 43, 47, 49, 50, 51, 52, 54, 56, 57, 61, 62, 64, 65, 66, 67, 68, 72, 73, 80, 81, 84, 88, 89, 90, 94, 96, 99, 100, 102, 104, 107, 110, 126, 127, 132, 136, 137, 138, 139, 140, 153, 154, 158, 165, 166, 167, 169, 176, 180, 182, 183, 185, 186, 188, 189, 193, 194, 195, 196, 197, 198, 199, 206, 210, 213, 216, 217, 220, 223, 226, 228, 230, 231, 232, 233, 236, 238, 241, 244, 247, 248, 251, 252, 261, 262, 265, 268, 282, 285, 286, 292, 293, 296, 297, 301, 302, 303, 304, 310, 318, 320, 324, 327, 331, 334, 337, 340, 341, 356, 367, 373, 374, 375, 377, 378, 379, 383, 384, 386, 395, 399, 400, 401, 403, 406, 407, 408, 409, 410, 424, 426, 430, 434, 437, 439, 441, 446, 447, 455, 456, 459, 463, 466, 467, 470, 471, 472, 475, 477, 478, 479, 485, 494, 499, 502, 508, 520, 524, 525, 526, 527, 529, 532, 533, 540, 545, 546, 552, 553, 554, 556, 557, 559, 560, 562, 565, 566, 570, 575, 585, 588, 597, 604, 605, 626, 631, 633, 634, 636, 642, 646, 652, 653, 656, 658, 662, 664, 670, 672, 673, 677, 683, 690, 692, 694, 695, 698, 701, 703, 706, 708, 710, 712, 713, 717, 718, 719, 721, 723, 724, 727, 743, 747, 752, 753, 755, 758, 762, 764, 767, 768, 771, 772, 774, and 775, where the positions are defined with reference to SEQ ID NO: 575.

[0019] For example, the amino acid substitution can be selected from one or more of the following:
[0020] V5T/A, D6N, E11N/D, V15I, I16V, I18V/L, E22N, G24K/E, K25R/E, I28V, H30Y, T33Y/E/N, R35E, P36E/H/M, I38F, R43K, K47Q/K/A, E49D, E50S, I51V, K52R, I54V, G56S/A, E57K/G, K61T/R, I62V, R64K/T, I65V, V66T/I/K, D67K/R, V68A, E72Q/K, K73R, I80V, T81E, K84R, E88T, H89R, P90F, P94E/Q, I96M, K99E/R, V100I, E102S/R/A, P104S, V1071, F110Y, L1261, I127V, E132N/D, K136T, I137F/L/M, L138M, A139S, F140V, G153A, K154E/T, I158L, E165G, N166S/G/E, E167G, K169R, I176V, Y180F, E182D, V183A, S185A, S186N/T, R188K, E189D, R193A, F194L, L195I, R196K, 1197V, 1198V, R199K, I206L, N210D, S213N/D, F216L, P217A, A220L/V/K, A223C, L226F/I, I228M/V, L230F, T231P/I, I232L, G233R, G236N, E238K, I241M, I244L/M, M247S/R, T248L/F, E251D, V2521, Y261F, H262P, T265L/R, I268V, I282V, K285T/R, P286Q, A292P, D293H/E, A296T, K297Q/T/E, S301T, G302N, E303K, N304G, K310R, A318V, Y320F, K324R, F327L, I331A, S334A, V337I, P340S, L341F, F356Y, V367L, S373D, E374G/K, E375K/R, Y377L, Q378V/A/E/D, R379E, E383G/N, S384G, T386A/E, KR395R, E399D, N400G, I401L, Y403S, F406Y, R407K/M/H, A408S/D/F/G/P/R/T, L409S/D/F/G/P/R/T/A, Y410S/D/F/G/P/R/T/A, L424F, L426K/R, K430G/M/R, I434E/T/V, Q437E, G439K, K441R, I446V/F, P447Q, G455K, H456N/A/S/R/D, E459D, K463E, T466R/K, K467R, E470A, T471S, Q472I/V/K, I475L/V, K477R, I478R/K, L479M, K485R, F494Y, G499A, K502R, K508R, K520D/Q/E, L524M/T/F, V525T/S, W526R/I, K527H/R, L529I, K532R, F533Y/R, I540A, L545V/F/I, Y546V/I/A/T, G552E/A, E553K/D, S554N/P/D, E556T, I557V, K559R, K560R, L562K/M, V565L, K566N/E/D, S570A, L575A, K585V/R/T, F588L, V597L, I604V/T, I605V/T, R626K, I631L, K633R, H634D, D636N, R642K/S, E646D, A652G/S, N653K, 1656V, P658V, A662V, Y664H, P670E/D, H672N/K/R, E673D, I677T, V683I, K690R, V6921, I694V, R695K, M698T, G701S, I703V, R706K, D708S, P710R, S712G, N713K/D, L717A/P, A718I/F, E719D, Y721F, P723G/L, K724T/A/R, K727R, L743E, E747R/K, R752K, K753R/A, D755E, Y758W, R762K, V764T, G767T, S768V/A, N771Q/K, I772L/V/P, K774G, and S775K, where the positions are defined with reference to SEQ ID NO: 575.

[0021] The polypeptide denoted as SEQ ID NO: 575 is derived from Pyrococcus furiosus, and contains three domains having the following sequences:

Domain 1:
atgattttagatgtggattacataactgaagaaggaaaacctgttattag
gctattcaaaaaagagaacggaaaatttaagatagagcatgatagaactt
ttagaccatacatttacgctcttctcagggatgattcaaagattgaagaa
gttaagaaaataacgggggaaaggcatggaaagattgtgagaattgttga
tgtagagaaggttgagaaaaagtttctcggcaagcctattaccgtgtgga
aactttatttggaacatccccaagatgttcccactattagagaaaaagtt
agagaacatccagcagttgtggacatcttcgaatacgatattccatttgc
aaagagatacctcatcgacaaaggcctaataccaatggagggggaagaag
agctaaagattcttgccttcgatatagaaaccctctatcacgaaggagaa
gagtttggaaaaggcccaattataatgattagttatgcagatgaaaatga
agcaaaggtgattacttggaaaaacatagatcttccatacgttgaggttg
tatcaagcgagagagagatgataaagagatttctcaggattatcagggag
aaggatcctgacattatagttacttataatggagactcattcgacttccc
atatttagcgaaaagggcagaaaaacttgggattaaattaaccattggaa
gagatggaagcgagcccaagatgcagagaataggcgatatgacggctgta
gaagtcaagggaagaatacatttcgacttgtatcatgtaataacaaggac
aataaatctcccaacatacacactagaggctgtatatgaagcaatttttg
gaaagccaaaggagaaggtatacgccgacgagatagcaaaagcctgggaa
agtggagagaaccttgagagagttgccaaatactcgatggaagatgcaaa
ggcaacttatgaactcgggaaagaattccttccaatggaaattcagcttt
caagattagttggacaacctttatgggatgtttcaaggtcaagcacaggg
aaccttgtagagtggttcttacttaggaaagcctacgaaagaaacgaa
Domain 2:
gtagctccaaacaagccaagtgaagaggagtatcaaagaaggctcaggga
gagctacacaggtggattcgttaaagagccagaaaaggggttgtgggaaa
acatagtatacctagattttagagccctatatccctcgattataattacc
cacaatgtttctcccgatactctaaatcttgagggatgcaagaactatga
tatcgctcctcaagtaggccacaagttctgcaaggacatccctggtttta
taccaagtctcttgggacatttgttagaggaaagacaaaagattaagaca
aaaatgaaggaaactcaagatcctatagaaaaaatactccttgactatag
acaaaaagcgataaaactcttagcaaattctttctacggatattatggct
atgcaaaagcaagatggtactgtaaggagtgtgctgagagcgttactgcc
tggggaagaaagtacatcgagttagtatggaaggagctcgaagaaaagtt
tggatttaaagtcctctacattgacactgatggtctctatgcaactatcc
caggaggagaaagtgaggaaataaagaaaaaggctctagaatttgtaaaa
tacataaattcaaagctccctggactgctagagcttgaatatgaagggtt
ttataagaggggattcttcgttacgaagaagaggtatgcagtaatagatg
aagaaggaaaagtcattactcgtggtttagagatagttaggagagattgg
agtgaaattgcaaaagaaactcaa
Domain 3:
gctagagttttggagacaatactaaaacacggagatgttgaagaagctgt
gagaatagtaaaagaagtaatacaaaagcttgccaattatgaaattccac
cagagaagctcgcaatatatgagcagataacaagaccattacatgagtat
aaggcgataggtcctcacgtagctgttgcaaagaaactagctgctaaagg
agttaaaataaagccaggaatggtaattggatacatagtacttagaggcg
atggtccaattagcaatagggcaattctagctgaggaatacgatcccaaa
aagcacaagtatgacgcagaatattacattgagaaccaggttcttccagc
ggtacttaggatattggagggatttggatacagaaaggaagacctcagat
accaaaagacaagacaagtcggcctaacttcctggcttaacattaaaaaa
tcctag

[0022] In some embodiments, the chimera DNA polymerase in this application has improved properties such as better Mg²⁺ tolerance, better SDS tolerance, better TE tolerance, and a higher long fragment amplification capability.

[0023] In some embodiments, the amino acid substitution may be selected from one or more amino acid substitutions corresponding to amino acids at the following positions: 210, 213, 377, 378, 407, 408, 409, 410, 474, and 501. The inventor of this application has discovered that amino acids at positions 408, 409 and/or 410 are related to a binding capability of dNTPs and all belong to the active center, which directly affects amplification efficiency and yield of the polymerase; amino acids at positions 210 and/or 213 are related to tolerance to an inhibitor, for example, when amino acids at positions 210 and 213 are D, the amino acids significantly increase a range of the tolerance to the inhibitor; the amino acids at the positions 210 and/or 213 are directly related to exonuclease activity because mutations at such sites are directly related to fidelity and proofreading activity of the polymerase; amino acids at positions 501, 474, and/or 377 are related to amplification efficiency of the polymerase, and therefore, mutations at such sites can improve yield of fragments of amplification targets; an amino acid at position 378 is directly related to tolerance to SDS; and an amino acid at position 407 is directly related to tolerance to Mg and TE.

[0024] This application further provides a DNA polymerase mutant with DNA replication activity, including an amino acid sequence, where when compared with a reference polypeptide denoted as SEQ ID NO: 575, the amino acid sequence includes one or more amino acid substitutions corresponding to amino acids at the following positions: 5, 6, 11, 15, 16, 18, 22, 24, 25, 28, 30, 33, 35, 36, 38, 43, 47, 49, 50, 51, 52, 54, 56, 57, 61, 62, 64, 65, 66, 67, 68, 72, 73, 80, 81, 84, 88, 89, 90, 94, 96, 99, 100, 102, 104, 107, 110, 126, 127, 132, 136, 137, 138, 139, 140, 153, 154, 158, 165, 166, 167, 169, 176, 180, 182, 183, 185, 186, 188, 189, 193, 194, 195, 196, 197, 198, 199, 206, 210, 213, 216, 217, 220, 223, 226, 228, 230, 231, 232, 233, 236, 238, 241, 244, 247, 248, 251, 252, 261, 262, 265, 268, 282, 285, 286, 292, 293, 296, 297, 301, 302, 303, 304, 310, 318, 320, 324, 327, 331, 334, 337, 340, 341, 356, 367, 373, 374, 375, 377, 378, 379, 383, 384, 386, 395, 399, 400, 401, 403, 406, 407, 408, 409, 410, 424, 426, 430, 434, 437, 439, 441, 446, 447, 455, 456, 459, 463, 466, 467, 470, 471, 472, 475, 477, 478, 479, 485, 494, 499, 502, 508, 520, 524, 525, 526, 527, 529, 532, 533, 540, 545, 546, 552, 553, 554, 556, 557, 559, 560, 562, 565, 566, 570, 575, 585, 588, 597, 604, 605, 626, 631, 633, 634, 636, 642, 646, 652, 653, 656, 658, 662, 664, 670, 672, 673, 677, 683, 690, 692, 694, 695, 698, 701, 703, 706, 708, 710, 712, 713, 717, 718, 719, 721, 723, 724, 727, 743, 747, 752, 753, 755, 758, 762, 764, 767, 768, 771, 772, 774, and 775, where the positions are defined with reference to SEQ ID NO: 575. In some embodiments, the amino acid substitution is selected from one or more of the following:
[0025] V5T/A, D6N, E11N/D, V15I, I16V, I18V/L, E22N, G24K/E, K25R/E, I28V, H30Y, T33Y/E/N, R35E, P36E/H/M, I38F, R43K, K47Q/K/A, E49D, E50S, I51V, K52R, I54V, G56S/A, E57K/G, K61T/R, I62V, R64K/T, I65V, V66T/I/K, D67K/R, V68A, E72Q/K, K73R, I80V, T81E, K84R, E88T, H89R, P90F, P94E/Q, I96M, K99E/R, V100I, E102S/R/A, P104S, V107I, F110Y, L1261, I127V, E132N/D, K136T, I137F/L/M, L138M, A139S, F140V, G153A, K154E/T, I158L, E165G, N166S/G/E, E167G, K169R, I176V, Y180F, E182D, V183A, S185A, S186N/T, R188K, E189D, R193A, F194L, L195I, R196K, I197V, I198V, R199K, I206L, N210D, S213N/D, F216L, P217A, A220L/V/K, A223C, L226F/I, I228M/V, L230F, T231P/I, I232L, G233R, G236N, E238K, I241M, I244L/M, M247S/R, T248L/F, E251D, V2521, Y261F, H262P, T265L/R, I268V, I282V, K285T/R, P286Q, A292P, D293H/E, A296T, K297Q/T/E, S301T, G302N, E303K, N304G, K310R, A318V, Y320F, K324R, F327L, I331A, S334A, V337I, P340S, L341F, F356Y, V367L, S373D, E374G/K, E375K/R, Y377L, Q378V/A/E/D, R379E, E383G/N, S384G, T386A/E, KR395R, E399D, N400G, I401L, Y403S, F406Y, R407K/M/H, A408S/D/F/G/P/R/T, L409S/D/F/G/P/R/T/A, Y410S/D/F/G/P/R/T/A, L424F, L426K/R, K430G/M/R, I434E/T/V, Q437E, G439K, K441R, I446V/F, P447Q, G455K, H456N/A/S/R/D, E459D, K463E, T466R/K, K467R, E470A, T471S, Q472I/V/K, I475L/V, K477R, 1478R/K, L479M, K485R, F494Y, G499A, K502R, K508R, K520D/Q/E, L524M/T/F, V525T/S, W526R/I, K527H/R, L529I, K532R, F533Y/R, I540A, L545V/F/I, Y546V/I/A/T, G552E/A, E553K/D, S554N/P/D, E556T, I557V, K559R, K560R, L562K/M, V565L, K566N/E/D, S570A, L575A, K585V/R/T, F588L, V597L, I604V/T, 1605V/T, R626K, I631L, K633R, H634D, D636N, R642K/S, E646D, A652G/S, N653K, I656V, P658V, A662V, Y664H, P670E/D, H672N/K/R, E673D, I677T, V683I, K690R, V6921, I694V, R695K, M698T, G701S, I703V, R706K, D708S, P710R, S712G, N713K/D, L717A/P, A718I/F, E719D, Y721F, P723G/L, K724T/A/R, K727R, L743E, E747R/K, R752K, K753R/A, D755E, Y758W, R762K, V764T, G767T, S768V/A, N771Q/K, I772L/V/P, K774G, and S775K.

[0026] In some embodiments, the DNA polymerase mutant shares a sequence identity of at least 70%, 75%, 80%, 85%, 90%, 95%, 97%, 98% or 99% reference polypeptide denoted as SEQ ID NO: 575.

[0027] In some embodiments, a DNA polymerase mutant in this application has improved properties such as better Mg²⁺ tolerance, better SDS tolerance, better TE tolerance, and a higher long fragment amplification capability.

[0028] In some embodiments, an amino acid sequence of the DNA polymerase mutant includes one or more amino acid substitutions corresponding to amino acids at the following positions: 210, 213, 377, 378, 407, 408, 409, 410, 474, and 501.

[0029] In some embodiments, the DNA polymerase in this application includes an amino acid sequence, sharing a sequence identity of at least 70%, 75%, 80%, 85%, 90%, 95%, 97%, 98% or 99% with any one of the amino acid sequences denoted as SEQ ID NOs: 1 to 574. In some embodiments, the DNA polymerase in this application includes any one of the amino acid sequences denoted as SEQ ID NOs: 1 to 574. Examples are as follows:

[0030] A polymerase with SEQ ID NO: 564 consists of the first domain with SEQ ID NO: 583, the second domain with SEQ ID NO: 586, and the third domain with SEQ ID NO: 596, and includes V5A, D6N, E11D, V15I, L18I, K25E, I28V, H30Y, T33N, R43K, K47Q, E49D, G56A, E72K, K78R, T81E, L86F, T95A, E98D, V100I, E132D, I137L, G153A, E167G, N175K, I176V, R196K, I197V, I205V, V2071, F216L, A220V, T231P, I232L, I244L, V252I, T265R, D293H, K297E, S301T, E303K, N304G, A318V, K324R, L327F, 1331A, F356Y, and V367I.

[0031] A polymerase with SEQ ID NO: 561 consists of the first domain with SEQ ID NO: 583, the second domain with SEQ ID NO: 586, and the third domain with SEQ ID NO: 598, and includes V5A, D6N, E11D, V15I, L18I, K25E, I28V, H30Y, T33N, R43K, K47Q, E49D, G56A, E72K, K78R, T81E, L86F, T95A, E98D, V100I, E132D, G153A, E167G, N175K, I176V, R196K, I197V, I205V, V207I, F216L, A220V, T231P, I232L, I244L, V252I, T265R, D293H, K297E, S301T, E303K, N304G, A318V, K324R, L327F, 1331A, F356Y, and V367I.

[0032] A polymerase with SEQ ID NO: 287 consists of the first domain with SEQ ID NO: 519, the second domain with SEQ ID NO: 584, and the third domain with SEQ ID NO: 595, and includes V5A, E11D, V151, K25R, I28V, H30Y, T33N, R43K, K47A, E49D, E50D, K52R, G56S, E57K, I62V, I65V, V66I, E72K, K78R, T81E, L86F, T95A, 196M, E98D, V100I, V107I, E132N, K136T, F140V, E167G, N175K, S185A, S186N, F194L, L195I, R196K, I197V, I205V, V207I, S213N, P217A, A220L, I228M, T231P, I232L, G236N, I244L, M247S, T248L, V252I, Y261F, H262P, T265R, P286Q, A292P, D293H, K297E, S301T, E303K, N304G, A318V, L327F, I331A, S334A, F356Y, and V367L.

[0033] A polymerase with SEQ ID NO: 503 consists of the first domain with SEQ ID NO: 581, the second domain with SEQ ID NO: 590, and the third domain with SEQ ID NO: 594, and includes E10D, V14I, L181, I28V, H30Y, T33N, R43K, K47Q, K52R, G56A, V66I, K78R, K83R, L86F, T95A, E98D, P104S, V107I, E132D, N175K, R196K, 1205V, V207I, F216L, A220V, I244L, V252I, K297E, K324R, and V367L.

[0034] A polymerase with SEQ ID NO: 532 consists of the first domain with SEQ ID NO: 583, the second domain with SEQ ID NO: 588, and the third domain with SEQ ID NO: 596, and includes V5A, D6N, E11D, V15I, L18I, K25E, I28V, H30Y, T33N, R43K, K47Q, E49D, G56A, E72K, K78R, T81E, L86F, T95A, E98D, V100I, E132D, G153A, E167G, N175K, I176V, R196K, I197V, I205V, V207I, F216L, A220V, T231P, I232L, I244L, V252I, T265R, D293H, K297E, S301T, E303K, N304G, A318V, K324R, L327F, I331A, F356Y, and V367L.

[0035] A polymerase with SEQ ID NO: 78 consists of the first domain with SEQ ID NO: 578, the second domain with SEQ ID NO: 586, and the third domain with SEQ ID NO: 598, and includes V5T, E11N, L18V, K24E, H30Y, R35E, I38F, R43K, K47A, E50D, I54V, G56A, K61T, I65V, V66K, D67R, V68A, E72Q, K73R, K78R, T81E, L86F, E87T, T95A, E98D, V100I, E102A, V1071, F110Y, E132D, K136T, K154T, I158L, E165G, E166S, K169R, N175K, E182D, S186T, R188K, I198V, R199K, I205V, I206L, V2071, S213N, A220K, A223C, L230F, I232L, M301I, I244M, M247R, T248F, H262P, T265R, I282V, D293E, K297Q, N304G, K310R, A318V, K324R, L327F, I331A, V337I, P340S, and V367I.

[0036] A polymerase with SEQ ID NO: 406 consists of the first domain with SEQ ID NO: 580, the second domain with SEQ ID NO: 591, and the third domain with SEQ ID NO: 596, and includes E11D, I15V, I16V, L18I, K25E, H30Y, T33N, R35E, R43K, K47A, G56A, 162V, I65V, V66K, D67R, V68A, E72K, K78R, T81E, L86F, T95A, E98D, V100I, F110Y, E132D, I158L, K169R, N175K, S186T, 1197V, R199K, I205V, I206L, V2071, S213N, P217A, A220K, A223C, L230F, I232L, M241I, I244M, M247R, T248F, E251D, H262P, T265R, D293E, K297E, S301T, N304G, K310R, A318V, K324R, L327F, I331A, V337I, and V367L.

[0037] A polymerase with SEQ ID NO: 403 consists of the first domain with SEQ ID NO: 580, the second domain with SEQ ID NO: 591, and the third domain with SEQ ID NO: 598, and includes E11D, I15V, I16V, L18I, K25E, H30Y, T33N, R35E, R43K, K47A, G56A, I62V, I65V, V66K, D67R, V68A, E72K, K78R, T81E, L86F, T95A, E98D, V100I, F110Y, E132D, I158L, K169R, N175K, S186T, 1197V, R199K, I205V, I206L, V2071, S213N, P217A, A220K, A223C, L230F, I232L, M241I, 1244M, M247R, T248F, E251D, H262P, T265R, D293E, K297E, S301T, N304G, K310R, A318V, K324R, L327F, I331A, V337I, and V367L.

[0038] This application also relates to biologically active fragments of the DNA polymerase in this application, and such fragments are considered to be included in terms “DNA polymerase in this application”, “chimera DNA polymerase in this application”, and “DNA polymerase mutant in this application”. The biologically active fragment of the DNA polymerase in this application includes fewer amino acids than a full-length protein, but exhibits at least one biological activity of the corresponding full-length protein. Generally, the biologically active fragment includes at least one domain or motif or segment of the DNA polymerase protein in this application. A biologically active fragment that lacks a local region of a protein can be prepared through recombination techniques, and the fragment is evaluated for one or more biological activities possessed by a full-length form of the DNA polymerase in this application.

[0039] The term “DNA polymerase” used in this application refers to an enzyme for replicating DNA, and replicates DNA from the 5′-end to the 3′-end by using DNA as a replication template. The DNA polymerase has an activity of catalyzing DNA syntheses in the presence of templates, primers, dNTPs, and the like and optionally, has auxiliary activities.

[0040] The term “amino acid” used in this application is a compound obtained by substituting a hydrogen atom on a carbon atom of carboxylic acid with an amino group. The amino acid molecule contains two functional groups: the amino group and carboxyl group. Similar to hydroxy acids, amino acids can be divided into α-amino acid, β-amino acid, γ-amino acid, . . . , w-amino acid based on different positions of amino groups on carbon chains, but amino acids obtained after protein hydrolysis are all α-amino acids, belong to only two dozen categories, and are basic units for forming proteins.

[0041] The term “PCR” or “polymerase chain reaction” used in this application is a molecular biology technology for amplifying specific DNA fragments, and can be regarded as special DNA replication in vitro. DNA is denatured into single strands at higher temperature of 95° C. in vitro. At lower temperature (usually around 60° C.), the primers and the single strands are combined according to a complementary base pairing rule, then the temperature is adjusted to optimal reaction temperature (around 72° C.) of the DNA polymerase, and the DNA polymerase synthesizes complementary strands along a direction from phosphate to pentose (5′-3′). A PCR machine manufactured based on polymerase is actually a temperature control device that can control the denaturation temperature, renaturation temperature, and extension temperature well.

[0042] There are five main types of substances participating in the PCR reaction, namely, primers, enzymes, dNTPs, templates and Mg²⁺, which can be called reaction elements. The primers are crucial to specific PCR reactions. Specificity of a PCR product depends on a degree of complementarity between the primers and the template DNA. Mg²⁺ has significant impact on specificity and yield of PCR amplification. In common PCR reactions, when concentrations of various dNTPs are 200 umol/L, an appropriate concentration of Mg²⁺ is 1.5 mmol/L to 2.0 mmol/L. If the concentration of Mg²⁺ is too high, reaction specificity is reduced and non-specific amplification occurs. If the concentration is too low, activity of the DNA polymerase is reduced and the reaction product is reduced.

[0043] The term “domain” used in this application refers to any structural fragment or specifically active region of the polymerase, for example, a DNA binding region, a nucleotide polymerization region, a dNTP binding region, a strand displacement binding region, or a region with proofreading activity.

[0044] The term “inhibitor tolerance” used in this application refers to a capability of the DNA polymerase to substantially maintain its enzymatic activity in the presence of substances that have an adverse effect on the PCR, including but not limited to Mg²⁺ tolerance, SDS tolerance, and TE tolerance. The tolerance to the inhibitor can be measured via the maximum inhibitor concentration at which the DNA polymerase still substantially has activity. In this application, the “Mg²⁺ tolerance” may refer to a capability of substantially maintaining activity of the DNA polymerase in the presence of Mg²⁺ at a concentration of more than 2 mM, 4 mM, 6 mM, 8 mM, or 10 mM. In this application, the “SDS tolerance” may refer to a capability of substantially maintaining the activity of the DNA polymerase in the presence of 0.00125% SDS, 0.0025% SDS, 0.005% SDS, 0.01% SDS, or 0.02% SDS. In this application, the “TE tolerance” may refer to a capability of substantially maintaining the activity of the DNA polymerase in the presence of 0.03125× TE, 0.0625× TE, 0.125× TE, 0.25× TE, 0.5× TE, or 1× TE. The term “substantially” used herein means that the DNA polymerase maintains 10%, 20%, 30%, 40%, 50%, 60%, 70%, 75%, 80%, 85%, 90%, 95%, 98%, 99% or above of the DNA polymerase activity in any or a specific target assay in vivo or in vitro. The target assay can be a semi-quantitative or quantitative PCR amplification experiment. Alternatively, the target assay may be, for example, a DNA binding assay, a nucleotide polymerization assay, a primer extension assay, a strand displacement assay, a reverse transcriptase assay, a proofreading assay, an accuracy assay, a thermal stability assay, or an ion stability assay.

[0045] The term “long fragment amplification capability” used in this application refers to a capability of the DNA polymerase to generate long fragments through the PCR reactions. In this application, the “long fragment amplification capability” may refer to the capability of amplifying continuous DNA fragments greater than 1 kb, 2 kb, 3 kb, 4 kb, 5 kb, 6 kb, 7 kb, 8 kb, 9 kb, or 10 kb.

[0046] The term “substitution” or “amino acid substitution” used herein refers to replacement of at least one amino acid residue in a specific amino acid sequence by another different amino acid residue. The representation of substitution is well known in the art. For example, T5V/A refers to substitution of T in the 5^{th} site with V or A, and D6N refers to substitution of D in the 6^{th} site with N. In some embodiments, the amino acid substitution is a conservative substitution. The “conserved substitution” means that one amino acid is replaced with another amino acid that has a common property. A method of functionally defining the common property of individual amino acids is to analyze a normalized frequency of amino acid changes between corresponding proteins in homologous organisms (Schulz (1979) Principles of Protein Structure, Springer-Verlag). Based on such an analysis, a family of amino acids can be determined, amino acids within the family are preferentially interchanged with each other, and have the most similar effects on the overall structure of the protein (Schulz (1979) ibid.). Examples of groups of amino acids defined in this way include: “charged/polar family”, including Glu, Asp, Asn, Gln, Lys, Arg, and His; “aromatic or ring family”, including Pro, Phe, Tyr and Trp; and “aliphatic family”, including Gly, Ala, Val, Leu, Ile, Met, Ser, Thr, and Cys. Within each family, subfamilies can also be determined. For example, the family of charged/polar amino acids can be further divided into subfamilies, the subfamilies include: a “positively charged subfamily” including Lys, Arg, and His; a “negatively charged subgroup” including Glu and Asp; and a “polar subfamily” including Asn and Gln. For another example, the aromatic or cyclopedic family can be further subdivided into subfamilies, including: “nitrogen ring subfamily” including Pro, His, and Trp; and the “phenyl subfamily”, including Phe and Tyr. For another example, the aliphatic group can be further divided into subfamilies, including: “large aliphatic non-polar subfamily”, including Val, Leu, and Ile; “aliphatic micropolar subfamily”, including Met, Ser, Thr, and Cys; and the “little residue subfamily”, including Gly and Ala. An example of a conserved mutation includes an amino acid substitution of an amino acid within the above subfamily, including but not limited to: a substitution of Arg with Lys or vice versa, to maintain a positive charge; a substitution of Asp with Glu or vice versa, which can maintain a negative charge; a substitution of Thr with Ser or vice versa, which can maintain free-OH; or a substitution of Asn with Gln or vice versa, which can maintain free —NH₂. A “conserved variant” is a peptide that contains one or more amino acids that have been replaced with an amino acid having a common property (belonging to, for example, the same amino acid family or subgroup) to replace one or more amino acids of the reference polypeptide (for example, a peptide whose sequence has been published in the literature or sequence database or whose sequence has been determined via nucleic acid sequencing).

[0047] The “natural” or “wild-type” refers to a form found in nature. For example, a natural or wild-type peptide or polynucleotide sequence is a sequence present in living organisms, such as a DNA polymerase sequence that has not been intentionally modified by human.

[0048] The term “percent identity” or “homology” with respect to the nucleic acid or peptide sequences is defined as the percentage of nucleotide or amino acid residues in a candidate sequence that are identical to a known polypeptide after the sequences are aligned for the purpose of maximum percentage identity and vacancies are introduced when needed to achieve the maximum percentage homology. An N-terminal or C-terminal insertion or deletion should not be interpreted as affecting homology. Homology or identity at the nucleotide or amino acid sequence level can be determined via BLAST (Basic Local Alignment Search Tool) analyses by executing algorithms via programs of blastp, blastn, blastx, tblastn and tblastx (Altschul (1997), Nucleic Acids Res. 25, 3389-3402, and Karlin (1990), Proc. Natl. Acad. Sci. USA 87, 2264-2268), which is tailored for sequence similarity search. A method used for the BLAST program is that similar segments with and without gaps in a query sequence and a database sequence are first considered, then statistical significance of all identified matches is evaluated, and finally only those matches that meet a preselected significance threshold are summarized. For a discussion of basic issues in similarity searches in sequence databases, see Altschul (1994), Nature Genetics 6: 119-129. Search parameters for histograms, description, comparison, expectation values (namely, statistical significance threshold for reporting matches for database sequences), cutoff values, matrices, and filtering (low complexity) can be set by default. A default scoring matrix used for the blastp, blastx, tblastn and tblastx is BLOSUM62 matrix (Henikoff (1992), Proc. Natl. Acad. Sci. USA 89, 10915-10919), which is recommended for a query sequence with a length exceeding 85 units (nucleotide bases or amino acids).

[0049] This application is intended to cover functional equivalents or functional variants of the DNA polymerase in this application. The terms “functional equivalent” and “functional variant” are used interchangeably herein. The “functional equivalent” and “functional variant” can be obtained via, for example, substitution, insertion, or deletion (for example, conservative substitution) of one or more amino acids of the DNA polymerase in this application.

### Nucleic Acid, Nucleic Acid Construct, and Host Cell

[0050] This application also provides isolated nucleic acids, including sequences encoding the DNA polymerases in this application. This application also relates to an isolated polynucleotide encoding at least one functional domain of the DNA polymerase in this application. Generally, such functional domain includes one or more substitutions described herein.

[0051] The nucleic acid molecule in this application can be produced by using standard molecular biology techniques well known to persons skilled in the art in conjunction with sequence information provided herein. For example, the desired nucleic acid can be prepared via PCR or synthesized de novo by using a standard synthesis technique.

[0052] When used herein, the terms “nucleic acid”, “polynucleotide”, and “nucleic acid molecule” are used interchangeably and are intended to include DNA and RNA (for example, mRNA) as well as analogues of DNA or RNA produced by using nucleotide analogues. The nucleic acid molecule may be single-stranded or double-stranded, but is preferably double-stranded DNA. The “isolated nucleic acid” and “isolated polynucleotide” are used interchangeably herein and refer to DNA or RNA that is not directly adjacent to two coding sequences (one sequence at the 5′ end and the other sequence at the 3′ end) directly adjacent to the DNA or RNA in the natural genome of the organism from which the DNA or RNA originated. Therefore, the term encompasses, for example, recombinant DNA integrated into the vector, recombinant DNA integrated into the autonomously replicating plasmid or virus, recombinant DNA integrated into the genomic DNA of prokaryotes or eukaryotes, or recombinant DNA that exists as a separate molecule independent of another sequence (for example, a cDNA or genomic DNA fragment produced via PCR or restriction endonuclease treatment). The term also includes recombinant DNA that is part of a heterozygous gene, and the heterozygous gene encodes additional polypeptides.

[0053] This application also relates to a nucleic acid construct containing the nucleic acid, the nucleic acid may be operationally linked to a control sequence that allows the nucleic acid to replicate or express in the host cell, and the control sequence includes but is not limited to, a promoter, an enhancer, a terminator, or an origin of replication. The term “nucleic acid construct” herein refers to a segment that has been modified to contain nucleic acids that are combined and juxtaposed in a way that would not exist in nature. The nucleic acid construct can refer to an expression cassette, an expression vector, or a replication vector.

[0054] The expression vector may be any vector (for example, a plasmid or virus) that facilitates the recombinant DNA procedure and can elicit the expression of the nucleic acid sequence encoding the DNA polymerase in this application. The selection of vector usually depends on the compatibility of the vector with the host cell into which the vector is to be introduced. The vector can be a linear plasmid or circular plasmid. The vector can be an autonomously replicating vector. That is, the vector exists as an extrachromosomal entity whose replication is independent of chromosomal replication, for example, the plasmid, extrachromosomal element, mini-chromosome, or artificial chromosome. If fungal-derived host cells are used, a suitable additional nucleic acid construct can be, for example, 2 μ or pKD1 plasmid derived from yeast. Alternatively, an expression vector may be a vector that is integrated into the genome when introduced into the host cell and that replicates along with the chromosome into which the vector has been integrated.

[0055] This application also relates to a host cell, including the nucleic acid or nucleic acid construct in this application. The nucleic acid construct and the vector in this application can be designed to express the DNA polymerase in this application in a prokaryotic host cell or an eukaryotic host cell. Suitable host cells for expressing the polymerase in this application are well known in the art, including, but not limited to, bacterial cells such as Escherichia coli, Lactobacillus kefir (Lactobacillus kefir), Lactobacillus brevis (Lactobacillus brevis), Lactobacillus minor (Lactobacillus minor), streptomycete and Salmonella typhimurium (Salmonella typhimurium) cells; fungal cells such as yeast cells (such as Saccharomyces cerevisiae or Pichia pastoris (Pichia pastoris)); insect cells such as drosophila S2 and lepidoptera Sf9 cells; animal cells such as CHO, COS, BHK, 293 and Bowes melanoma cells; and plant cells. Suitable culture media and growth conditions for the foregoing host cells are well known in the art.

[0056] The polynucleotide for expressing the polymerase polypeptide can be introduced into the cell in various methods known in the art, including, but not limited to, electroporation, biological particle bombardment, liposome-mediated transfection, calcium chloride transfection, and protoplast fusion. Persons skilled in the art are aware of the various methods of introducing polynucleotides into cells.

### Kit

[0057] This application also relates to a kit, including a DNA polymerase, a nucleic acid, a nucleic acid construct, or a host cell in this application. The kit may include various reagents and containers for polynucleotide syntheses (including syntheses in PCR). The kit in this application may also include one or more of the following substances: a polynucleotide precursor, a primer, a buffer, an instruction for use, and a reference substance.

### Composition

[0058] This application also relates to a composition, including the DNA polymerase in this application. The composition may be, for example, a PCR reaction system, including, for example, a primer, a buffer, dNTP, a template and/or Mg²⁺.

### Method of Preparing DNA Polymerase

[0059] This application also relates to a method of preparing DNA polymerase.

[0060] In some embodiments, the method includes:
[0061] providing a chimera polypeptide including a first domain, encoded by a nucleotide sequence selected from nucleotide sequences denoted as SEQ ID NOs: 576 to 583, a second domain, encoded by a nucleotide sequence selected from nucleotide sequences denoted as SEQ ID NOs: 584 to 591, and a third domain, encoded by a nucleotide sequence selected from nucleotide sequences denoted as SEQ ID NOs: 592 to 599; and
[0062] optionally, introducing one or more amino acid substitutions selected from the following:
[0063] V5T/A, D6N, E11N/D, V15I, I16V, I18V/L, E22N, G24K/E, K25R/E, I28V, H30Y, T33Y/E/N, R35E, P36E/H/M, I38F, R43K, K47Q/K/A, E49D, E50S, I51V, K52R, I54V, G56S/A, E57K/G, K61T/R, I62V, R64K/T, I65V, V66T/I/K, D67K/R, V68A, E72Q/K, K73R, I80V, T81E, K84R, E88T, H89R, P90F, P94E/Q, I96M, K99E/R, V100I, E102S/R/A, P104S, V107I, F110Y, L126I, I127V, E132N/D, K136T, I137F/L/M, L138M, A139S, F140V, G153A, K154E/T, I158L, E165G, N166S/G/E, E167G, K169R, I176V, Y180F, E182D, V183A, S185A, S186N/T, R188K, E189D, R193A, F194L, L195I, R196K, I197V, I198V, R199K, I206L, N210D, S213N/D, F216L, P217A, A220L/V/K, A223C, L226F/I, I228M/V, L230F, T231P/I, I232L, G233R, G236N, E238K, I241M, I244L/M, M247S/R, T248L/F, E251D, V2521, Y261F, H262P, T265L/R, I268V, I282V, K285T/R, P286Q, A292P, D293H/E, A296T, K297Q/T/E, S301T, G302N, E303K, N304G, K310R, A318V, Y320F, K324R, F327L, I331A, S334A, V337I, P340S, L341F, F356Y, V367L, S373D, E374G/K, E375K/R, Y377L, Q378V/A/E/D, R379E, E383G/N, S384G, T386A/E, KR395R, E399D, N400G, I401L, Y403S, F406Y, R407K/M/H, A408S/D/F/G/P/R/T, L409S/D/F/G/P/R/T/A, Y410S/D/F/G/P/R/T/A, L424F, L426K/R, K430G/M/R, I434E/T/V, Q437E, G439K, K441R, I446V/F, P447Q, G455K, H456N/A/S/R/D, E459D, K463E, T466R/K, K467R, E470A, T471S, Q472I/V/K, I475L/V, K477R, I478R/K, L479M, K485R, F494Y, G499A, K502R, K508R, K520D/Q/E, L524M/T/F, V525T/S, W526R/I, K527H/R, L529I, K532R, F533Y/R, I540A, L545V/F/I, Y546V/I/A/T, G552E/A, E553K/D, S554N/P/D, E556T, I557V, K559R, K560R, L562K/M, V565L, K566N/E/D, S570A, L575A, K585V/R/T, F588L, V597L, I604V/T, I605V/T, R626K, I631L, K633R, H634D, D636N, R642K/S, E646D, A652G/S, N653K, I656V, P658V, A662V, Y664H, P670E/D, H672N/K/R, E673D, I677T, V683I, K690R, V6921, I694V, R695K, M698T, G701S, I703V, R706K, D708S, P710R, S712G, N713K/D, L717A/P, A718I/F, E719D, Y721F, P723G/L, K724T/A/R, K727R, L743E, E747R/K, R752K, K753R/A, D755E, Y758W, R762K, V764T, G767T, S768V/A, N771Q/K, I772L/V/P, K774G, and S775K,
[0064] where the positions are defined with reference to SEQ ID NO: 575; and
[0065] obtaining the DNA polymerase with DNA replication activity.

[0066] The chimera polypeptide including the first domain, the second domain and the third domain can be provided via seamless cloning.

[0067] In some embodiments, the method includes introducing, into the polypeptide denoted as SEQ ID NO: 575, one or more amino acid substitutions selected from the following:
[0068] V5T/A, D6N, E11N/D, V15I, I16V, I18V/L, E22N, G24K/E, K25R/E, I28V, H30Y, T33Y/E/N, R35E, P36E/H/M, I38F, R43K, K47Q/K/A, E49D, E50S, I51V, K52R, I54V, G56S/A, E57K/G, K61T/R, I62V, R64K/T, I65V, V66T/I/K, D67K/R, V68A, E72Q/K, K73R, I80V, T81E, K84R, E88T, H89R, P90F, P94E/Q, I96M, K99E/R, V100I, E102S/R/A, P104S, V1071, F110Y, L1261, I127V, E132N/D, K136T, I137F/L/M, L138M, A139S, F140V, G153A, K154E/T, I158L, E165G, N166S/G/E, E167G, K169R, I176V, Y180F, E182D, V183A, S185A, S186N/T, R188K, E189D, R193A, F194L, L195I, R196K, I197V, I198V, R199K, I206L, N210D, S213N/D, F216L, P217A, A220L/V/K, A223C, L226F/I, I228M/V, L230F, T231P/I, I232L, G233R, G236N, E238K, I241M, I244L/M, M247S/R, T248L/F, E251D, V2521, Y261F, H262P, T265L/R, I268V, I282V, K285T/R, P286Q, A292P, D293H/E, A296T, K297Q/T/E, S301T, G302N, E303K, N304G, K310R, A318V, Y320F, K324R, F327L, I331A, S334A, V337I, P340S, L341F, F356Y, V367L, S373D, E374G/K, E375K/R, Y377L, Q378V/A/E/D, R379E, E383G/N, S384G, T386A/E, KR395R, E399D, N400G, I401L, Y403S, F406Y, R407K/M/H, A408S/D/F/G/P/R/T, L409S/D/F/G/P/R/T/A, Y410S/D/F/G/P/R/T/A, L424F, L426K/R, K430G/M/R, I434E/T/V, Q437E, G439K, K441R, I446V/F, P447Q, G455K, H456N/A/S/R/D, E459D, K463E, T466R/K, K467R, E470A, T471S, Q472I/V/K, I475L/V, K477R, I478R/K, L479M, K485R, F494Y, G499A, K502R, K508R, K520D/Q/E, L524M/T/F, V525T/S, W526R/I, K527H/R, L529I, K532R, F533Y/R, I540A, L545V/F/I, Y546V/I/A/T, G552E/A, E553K/D, S554N/P/D, E556T, I557V, K559R, K560R, L562K/M, V565L, K566N/E/D, S570A, L575A, K585V/R/T, F588L, V597L, I604V/T, I605V/T, R626K, I631L, K633R, H634D, D636N, R642K/S, E646D, A652G/S, N653K, I656V, P658V, A662V, Y664H, P670E/D, H672N/K/R, E673D, I677T, V683I, K690R, V6921, I694V, R695K, M698T, G701S, I703V, R706K, D708S, P710R, S712G, N713K/D, L717A/P, A718I/F, E719D, Y721F, P723G/L, K724T/A/R, K727R, L743E, E747R/K, R752K, K753R/A, D755E, Y758W, R762K, V764T, G767T, S768V/A, N771Q/K, I772L/V/P, K774G, and S775K,
[0069] where the positions are defined with reference to SEQ ID NO: 575.

### Use of Nucleic Acid Amplification

[0070] This application also relates to a nucleic acid amplification method, including amplifying a DNA sequence by using the DNA polymerase in this application, the kit, the composition (the PCR reaction system) or the DNA polymerase prepared in the preparation method in this application.

[0071] In some embodiments, in the method, the nucleic acid is mixed with the DNA polymerase in this application or a biologically active fragment thereof under conditions suitable for amplifying the nucleic acid; and the nucleic acid is amplified via the polymerase chain reaction, an isothermal amplification reaction, recombinase polymerase amplification reaction, rolling circle amplification, or strand displacement amplification. The amplification includes amplification of the nucleic acid in a solution or on a solid support such as nucleic acid beads, flow cells, an nucleic acid array, or pores existing on a surface of the solid support. The polymerase chain reactions (PCR) include, but are not limited to, hot start PCR, landing PCR, nested PCR, inverse PCR, site-directed PCR mutagenesis, RT-PCR, RACE, multiplex PCR, asymmetric PCR, in situ PCR, quantitative PCR, whole-genome amplification, and error-prone PCR.

### Method for Improving a Property of a DNA Polymerase

[0072] This application also relates to a method for improving a property of a DNA polymerase.

[0073] In some embodiments, the method includes replacing a corresponding domain of a to-be-improved DNA polymerase with one or more domains encoded by one nucleotide sequence selected from nucleotide sequences denoted as SEQ ID NOs: 576 to 599.

[0074] In some embodiments, the method includes:
[0075] introducing, into a to-be-improved DNA polymerase, one or more amino acid substitutions selected from the following:
[0076] VST/A, D6N, E11N/D, V15I, I16V, I18V/L, E22N, G24K/E, K25R/E, I28V, H30Y, T33Y/E/N, R35E, P36E/H/M, I38F, R43K, K47Q/K/A, E49D, E50S, I51V, K52R, I54V, G56S/A, E57K/G, K61T/R, I62V, R64K/T, I65V, V66T/I/K, D67K/R, V68A, E72Q/K, K73R, I80V, T81E, K84R, E88T, H89R, P90F, P94E/Q, I96M, K99E/R, V100I, E102S/R/A, P104S, V107I, F110Y, L1261, I127V, E132N/D, K136T, I137F/L/M, L138M, A139S, F140V, G153A, K154E/T, I158L, E165G, N166S/G/E, E167G, K169R, I176V, Y180F, E182D, V183A, S185A, S186N/T, R188K, E189D, R193A, F194L, L195I, R196K, I197V, I198V, R199K, I206L, N210D, S213N/D, F216L, P217A, A220L/V/K, A223C, L226F/I, I228M/V, L230F, T231P/I, I232L, G233R, G236N, E238K, I241M, I244L/M, M247S/R, T248L/F, E251D, V2521, Y261F, H262P, T265L/R, I268V, I282V, K285T/R, P286Q, A292P, D293H/E, A296T, K297Q/T/E, S301T, G302N, E303K, N304G, K310R, A318V, Y320F, K324R, F327L, I331A, S334A, V337I, P340S, L341F, F356Y, V367L, S373D, E374G/K, E375K/R, Y377L, Q378V/A/E/D, R379E, E383G/N, S384G, T386A/E, KR395R, E399D, N400G, I401L, Y403S, F406Y, R407K/M/H, A408S/D/F/G/P/R/T, L409S/D/F/G/P/R/T/A, Y410S/D/F/G/P/R/T/A, L424F, L426K/R, K430G/M/R, I434E/T/V, Q437E, G439K, K441R, I446V/F, P447Q, G455K, H456N/A/S/R/D, E459D, K463E, T466R/K, K467R, E470A, T471S, Q472I/V/K, I475L/V, K477R, I478R/K, L479M, K485R, F494Y, G499A, K502R, K508R, K520D/Q/E, L524M/T/F, V525T/S, W526R/I, K527H/R, L529I, K532R, F533Y/R, I540A, L545V/F/I, Y546V/I/A/T, G552E/A, E553K/D, S554N/P/D, E556T, I557V, K559R, K560R, L562K/M, V565L, K566N/E/D, S570A, L575A, K585V/R/T, F588L, V597L, I604V/T, I605V/T, R626K, I631L, K633R, H634D, D636N, R642K/S, E646D, A652G/S, N653K, I656V, P658V, A662V, Y664H, P670E/D, H672N/K/R, E673D, I677T, V683I, K690R, V6921, I694V, R695K, M698T, G701S, I703V, R706K, D708S, P710R, S712G, N713K/D, L717A/P, A718I/F, E719D, Y721F, P723G/L, K724T/A/R, K727R, L743E, E747R/K, R752K, K753R/A, D755E, Y758W, R762K, V764T, G767T, S768V/A, N771Q/K, I772L/V/P, K774G, and S775K, where the positions are defined with reference to SEQ ID NO: 575.

[0077] The improved properties may be selected from one or more of a better extension characteristic, a better DNA binding characteristic, a better corrective activity, a better fidelity, a higher amplification speed, a better tolerance to an inhibitor, and a higher long fragment amplification capability. In some embodiments, the improved property is selected from one or more of the following: better Mg²⁺ tolerance, better SDS tolerance, better TE tolerance, and higher long fragment amplification capability.

### BRIEF DESCRIPTION OF DRAWINGS

[0078] The following drawings are for an illustration purpose only other than a limitation purpose.

[0079] FIG. 1 exemplarily shows an alignment diagram of polymerase sequences. A sequence alignment result is obtained after amino acid sequence alignment of a polymerase derived from thermophilic bacteria. Similarity is over 85%. Amino acid sequences marked with “*” are the same amino acid sequences, and amino acid sequences marked with “.” are different amino acid sequences. Amino acid sequences of 8 template polymerases are numbered 1 to 8.

[0080] FIG. 2 exemplarily shows a library establishment process of a chimera polymerase library. A block A can be derived from domains from 8 different sources, a block B is also derived from domains in templates 1 to 8, and a block C is also derived from domains in the templates 1 to 8. The nucleotide sequence is blocks A1 to A8, blocks B1 to B8, and blocks C1 to C8.

[0081] FIG. 3 exemplarily shows a Mg²⁺ tolerance test. Lane 1: 0 mM Mg²⁺; Lane 2: 2 mM Mg²⁺; Lane 3: 4 mM Mg²⁺; Lane 4: 6 mM Mg²⁺; Lane 5: 8 mM Mg²⁺; and Lane 6: 10 mM Mg²⁺. All concentrations are final concentrations of reactions. A source of Mg²⁺ can be either MgCl₂ or MgSO₄. The results show that the chimera polymerase can tolerate 0 mM Mg²⁺ to 10 mM Mg²⁺.

[0082] FIG. 4 exemplarily shows an SDS tolerance test. Lane 1: 0% SDS; Lane 2:0.00125% SDS; Lane 3:0.0025% SDS; Lane 4:0.005% SDS; Lane 5:0.01% SDS; Lane 6:0.02% SDS; Lane 7:0.04% SDS; and Lane 8:0.08% SDS. All concentrations are final concentrations of reactions. The results show that the chimera polymerase can tolerate 0.02% SDS.

[0083] FIG. 5 exemplarily shows a TE tolerance test. Lane 1: 0×; Lane 2:0.03125× TE; Lane 3: 0.0625× TE; Lane 4: 0.125× TE; Lane 5: 0.25× TE; Lane 6: 0.5× TE; Lane 7: 1' TE; and Lane 8: 2× TE. All concentrations are final concentrations of reactions. The results show that the chimera polymerase can tolerate 1× TE.

[0084] FIG. 6 exemplarily shows amplification of human gDNAs to different sizes. Lane 1: 1 kb; Lane 2: 2 kb; Lane 3: 3 kb; Lane 4: 4 kb; Lane 5: 5 kb; Lane 6 :6 kb; Lane 7: 7 kb; Lane 8: 8 kb; Lane 9: 9 kb; and Lane 10: 10 kb. The results show that the chimera polymerase can amplify long fragments.

### DETAILED DESCRIPTION

### EXAMPLES

[0085] This application is further described with reference to specific examples. It should be understood that these examples are only used to illustrate the present invention and are not intended to limit the scope of the present invention. In the following example, a test method in which a detailed condition is not specified is usually performed under a regular condition or a condition recommended by a manufacturer. Unless otherwise stated, percentages and parts are calculated by weight.

[0086] Unless otherwise stated, materials and reagents used in the examples of the present invention are all commercially available products.

### Example 1: Preparation of a Chimera Polymerase

### 1. Clone Establishment

### 1.1. Primers

[0087] The primers (numbered as SEQ ID NOs: 600 to 647 in sequence) required for nucleotide sequences of the first domain with SEQ ID NOs: 576 to 583, the second domain with SEQ ID NOs: 584 to 591, and the third domain with SEQ ID NOs: 592 to 599 are shown in Table 1 below:

TABLE 1

| | |
|---|---|
| 576-F | CTTTAAGAAGGAGATATACATATGATTCTGGACGCTGACTATATT |
| 576-R | CATACGCTTTACGCAGCAGGAACCATTCAACCAGGTTACCG |
| 584-F | CTGCTGCGTAAAGCGTATGAACGCAACGAACTGGCACCGAATAAACCGTC |
| | CG |
| 584-R | GGGTTTCTTTGGCAATTTCACTCCAATCGCGACGCACAATTTCCAGACCG |
| 592-F | TGAAATTGCCAAAGAAACCCAGGCACGTGTTCTGGAAGCACTGCTGAAA |
| | G |
| 592-R | GTGGTGGTGCTCGAGTTACTTTTTACCCTTCGGTTTCAG |
| 577-F | AACTTTAAGAAGGAGATATACATAtgattctggatacggactata |
| 577-R | TCATACGCTTTACGCAGCAGaaaccattcgaccaggttacccg |
| 585-F | CTGCTGCGTAAAGCGTATGAACGCAACGAActggcgccgaataaaccggat |
| 585-R | TTTCTTTGGCAATTTCACTCCAATCacggcgcacgatttccagaccgc |
| 593-F | GTGAAATTGCCAAAGAAACCCAGGCAcgtgtcctggaagcaatcctg |
| 593-R | GTGGTGGTGGTGCTCGAGttactttttcactttcagccacgc |
| 578-F | TTTAAGAAGGAGATATACATATGATTCTGGACACGGACTATATTA |
| 578-R | GTTCATACGCTTTACGCAGCAGGAACCATTCAACCAGGTTACCCGT |
| 586-F | GCGTAAAGCGTATGAACGCAACGAAATTGCGCCGAATAAACCGGATGAA |
| 586-R | GTTTCTTTGGCAATTTCACTCCAATCACGGCGCACGATTTCCAGACC |
| 594-F | TGAAATTGCCAAAGAAACCCAGGCACGCGTTCTGGAAGCAATCCT |
| 594-R | GGTGGTGGTGGTGCTCGAGttaTTTCTTACCTTTCAGCTTCAG |
| 579-F | TTAAGAAGGAGATATACATATGATTCTGGATGCTGATTACATTA |
| 579-R | TTGCGTTCATACGCTTTACGCAGCAGATACCATTCCACCAGATTACC |
| 587-F | AGCGTATGAACGCAACGAACTGGCGCCGAATAAACCGGATGAAC |
| 587-R | TTTCTTTGGCAATTTCACTCCAATCGCGACGCACGATTTCCAGACCA |
| 595-F | GAGTGAAATTGCCAAAGAAACCCAGGCAAAGGTTCTGGAAGCAA |
| 595-R | GGTGGTGGTGGTGCTCGAGttaAGACTTTTTAACTTTCAGCC |
| 580-F | TTAAGAAGGAGATATACATAtgatcctggatgcggactacatt |
| 580-R | TCATACGCTTTACGCAGCAGgaaccattcgaccaggttaccgg |
| 588-F | TGCGTAAAGCGTATGAACGCAACGAActggcgccgaataaaccgtcgggc |
| 588-R | TTCTTTGGCAATTTCACTCCAATCgcgacgcacgatttccagacc |
| 596-F | AGTGAAATTGCCAAAGAAACCCAGGCAcgcgtcctggaagcaatcctgaaag |
| 596-R | GGTGGTGGTGGTGCTCGAGttattttttacctttcggtttcag |
| 581-F | CTTTAAGAAGGAGATATACATATGATCCTGGACACCGATTACATTAC |
| 581-R | GGTGGTGGTGGTGCTCGAGTTATTTCTTACCTTTCGGTTGCAG |
| 589-F | CTGCTGCGTAAAGCGTATGAAC |
| 589-R | TTCGTTGCGTTCATACGCTTTACG |
| 597-F | TGAAATTGCCAAAGAAACCCAGGCA |
| 597-R | GTTTCTTTGGCAATTTCACTCCAATC |
| 582-F | TTTAAGAAGGAGATATACATATGATCCTGGACGCAAACTACAT |
| 582-R | TCATACGCTTTACGCAGCAGATACCATTCCACCAGGTTACCGG |
| 590-F | GCGTAAAGCGTATGAACGCAACGAACTGGCACCGAATAAACCGGATG |
| 590-R | TTTCTTTGGCAATTTCACTCCAATCGCGACGAACGATTTCCAGACC |
| 598-F | GTGAAATTGCCAAAGAAACCCAGGCAAAAGTTCTGGAAGCAATCCT |
| 598-R | GTGGTGGTGGTGCTCGAGTTATTTCTTTTTCACATTCAGC |
| 583-F | TTTAAGAAGGAGATATACATATGATCCTGGACGTGGACTACA |
| 583-R | CATACGCTTTACGCAGCAGGAACCATTCAACCAGATTGCC |
| 591-F | TGCTGCGTAAAGCGTATGAACGCAACGAAGTGGCACCGAATAAACCGGAT |
| | GAA |
| 591-R | TTCTTTGGCAATTTCACTCCAATCGCGACGAACAATTTCCAGGC |
| 599-F | GGAGTGAAATTGCCAAAGAAACCCAGGCACGTGTTCTGGAAGCAATTCT |
| | GAAAC |
| 599-R | TGGTGGTGGTGGTGCTCGAGttaCGATTTTTTAATATTCAGCCATG |

[0088] 1.2. Main Reagents: Plasmids were all plasmid templates stored in the laboratory, dNTP (RK20120, ABclonal), Pfu-fast 2× PCR Master Mix (RK20652, ABclonal), and 2× MultiF Seamless Assembly Mix (RK21020, ABclonal).

[0089] 1.3. Main Instruments: PCR machine (Eastwin), ETC811; gel imager, Tanon 1600; electrophoresis apparatus, EPS 300; oscillator, VORTEX-5, Kylin-Bell; and NanoDrop 1000, Thermo.

### 2. Test Procedure

### 2.1. PCR Amplification

[0090] A reaction system was prepared, and then the system was quickly transferred to a PCR machine (Eastwin, ETC811) preheated 95° C. A 50 μL reaction system is shown in Table 2 below.

TABLE 2

| Components | Content | |
|---|---|---|
| ddH₂O | Diluted to 50 μL | |
| Upstream primer (10 μM) | 1 | μL |
| Downstream primer (10 μM) | 1 | μL |
| Template DNA | 10 | ng |
| Pfu-fast 2X PCR Master Mix | 25 | μL |

PCR reaction procedure

| | | |
|---|---|---|
| Temperature | Time | Quantity of cycles |

| | | | |
|---|---|---|---|
| 95° C. | 2 | min | 1 |
| 95° C. | 20 | s | |
| Tm-5° C. | 20 | s | 30 |
| 72° C. | 1 | min | |
| 72° C. | 5 | min | 1 |

| | |
|---|---|
| 4° C.-10° C. | ∞ |

### 2.2. Product Determination

[0091] After 10 μL of product was taken and 2 μL of 6× loading buffer was added and mixed well, 1% agarose gel electrophoresis was performed for determination at 150V for 45 minutes, and the gel imager was used to see if there were correct bands.

### 2.3. Product Purification

[0092] Purification was performed with a common DNA product purification kit (common DNA product purification kit, DP204, Tiangen Biotech (Beijing) Co., Ltd.).

[0093] 2.3.1. Before use, absolute ethanol needed to be added to a rinse solution PW.

[0094] 2.3.2. Column Equilibration Step: 500 μL of equilibration solution BL was added to an adsorption column CB2 (the adsorption column was put in the collection tube), the collection tube was centrifuged at 12000 rpm (˜13400×g) for 1 minute, a waste liquid in the collection tube was discarded, and the adsorption column CB2 was put back into the collection tube.

[0095] 2.3.3. The volume of the PCR reaction solution or enzyme digestion reaction solution was

[0096] estimated, the binding solution PB with the volume 5 times the volume of the solution was add to the solution, and mixed well (paraffin oil or mineral oil DOES did not need to be removed). Note: If the volume of the PCR reaction solution was 50 μL (excluding the volume of paraffin oil), 250 μL of binding solution PB was added.

[0097] 2.3.4. The solution obtained through the previous step was added to an adsorption column CB2 (the adsorption column was put in the collection tube), the collection tube was left standing at room temperature for 2 minutes, and centrifuged at 12000 rpm (˜13400×g) for 30 s to 60 s, a waste liquid in the collection tube was discarded, and the adsorption column CB2 was put into the collection tube. Note: The volume of adsorption column was 800 μL, and if the volume of sample was greater than 800 μL, the sample could be added in batches.

[0098] 2.3.5. 600 μL of rinse solution PW was added to the adsorption column CB2 (It should be checked whether absolute ethanol was added before use), the adsorption column was centrifuged at 12000 rpm (˜13400×g) for 30 s to 60 s, the waste liquid in the collection tube was discarded, and the adsorption column CB2 was put into the collection tube. Note: If the purified DNA is used for salt-sensitive experiments, such as blunt-end ligation experiments or direct sequencing, it is recommended that PW be added and left standing for 2 minutes to 5 minutes before centrifugation.

[0099] 2.3.6. The adsorption column CB2 was put back into the collection tube, the collection tube was centrifuged at 12000 rpm (˜13400×g) for 2 minutes, and the rinse solution was removed to the maximum extent. The adsorption column CB2 was left standing at room temperature for a few minutes and air-dried thoroughly to prevent residual rinse solution from affecting the subsequent test. Note: Ethanol residues in the rinse solution can affect subsequent enzymatic reaction (enzyme digestion, PCR, and the like) tests

[0100] 2.3.77. The adsorption column CB2 was put into a clean centrifuge tube, 30 μL of elution buffer EB was added dropwise to the middle of an adsorption membrane and was left standing for 2 minutes at room temperature. The centrifuge tube was centrifuged at 12000 rpm (˜13400×g) for 2 minutes to collect the DNA solution.

### 2.4. Quantitative Determination

[0101] The purified PCR product was taken and 1 μL of the purified PCR product was added to the Nanodrop 1000 for concentration determination.

### 2.5. Ligation

[0102] The ABclonal MultiF Seamless Assembly Mix (RK21020) was used for ligation. The specific reaction system is shown in Table 3 below:

TABLE 3

| Components | Dosage | |
|---|---|---|
| Total amount of inserted DNA | 1 | pmol |
| Amount of carrier | 0.3 | pmol |
| 2X MultiF Seamless | 10 | μL |
| ddH₂O | Diluted to 20 μL | |
| Total volume | 20 | μL |

Reaction process

| Fragment assembly | 24 fragments | |
|---|---|---|
| Reaction temperature | 50° | C. |
| Reaction time | 60 | min |

### 2.6. Transformation

[0103] 2.6.1. Competent cells used for cloning (C2566, ABclonal) thawed on ice.

[0104] 2.6.2. 10 μL of the assembly product was added to 100 μL of competent cells, a tube wall

[0105] was flicked for even mixing (oscillation should be avoided), a resulting mixture was left standing on ice for 30 minutes; and a volume of the assembly product after transformation should not exceed ⅙ of a volume of the used competent cells.

[0106] 2.6.3. After being subjected to heat shock in water bath at 42° C. for 45 seconds, the resulting mixture was immediately put on ice for cooling for 2 to 3 minutes.

[0107] 2.6.4. 900 μL of SOC or LB culture medium (containing no antibiotics) was added and the

[0108] resulting mixture was oscillated for even mixing at 37° C. for 1 hour (rotational speed: 200 rpm to 250 rpm).

[0109] 2.6.5. A corresponding resistant LB plate was preheated in an incubator at 37° C.

[0110] 2.6.6. The resulting mixture was centrifuged at 5000 rpm for 5 minutes, 900 μL of the supernatant was discarded, the bacteria was resuspended, and a resuspension was gently spread evenly on the plate containing the corresponding resistant substance with a sterile spreader stick.

[0111] 2.6.7. The resulting mixture was put upside down and incubated in the incubator at 37° C. for 12 hours to 16 hours.

### 2.7. Sequencing

[0112] After overnight culture, hundreds of monoclonals can be formed on the plate, and clones on the plate in the negative control group after transformation should be significantly outnumbered by the former; and a few monoclonals were selected for determination in a first-generation sequencing method. If a sequencing result of the plasmid was correct, the plasmid was saved and expressed.

### 2. High-Throughput Expression and Purification

### 2.1. Main Reagents and Materials

[0113] (1) 96-well PCR plate (Axygen, catalog number: PCR-96m2-hs-c, no sterilization required), 48-well deep-well plate (Sangon Biotech, catalog number: F600480-0001, autoclave sterilized and dried before use), 96-well deep-well plate (NEST, catalog number: 503001, no sterilization required) and matching silicone lids (sterilization required), 96-well filter plate (Sangon Biotech, catalog number: B615006, no sterilization required), quartz sand, DEAE padding (GE), DNase I (Abclonal, catalog number: RK20538), and 100 μL PCR 8-tube strips (Axygen, catalog number: PCR-0108-LP-RT-C).
[0114] (2) LB liquid medium (ABclonal)
[0115] (3) IPTG, Amp, 50% glycerol (ABclonal)

### 2.2. Main Instruments

[0116] Super clean bench (Airtech, SW-CJ-1FD), refrigerated centrifuge (Cence, L530R), small-sized thermostatic oscillator (Crystal Technology & Industries, Inc., IS-RSD81), PCR machine (Eastwin, ETC811), high-throughput tissue grinder (Wonbio, Wonbio-96), microplate reader (SYNERG, H1), precision constant temperature sink (Shanghai Yiheng Instruments Co., Ltd., BWS-12), and so on.

### 2.3. Test Steps

### 2.3.1. Recombinant Plasmid Transformation

[0117] (1) The recombinant plasmids were sorted, 47 vials were put in each box and arranged in order.
[0118] (2) A 96-well PCR plate (unopened), 200 μL yellow pipette tips, and an alcohol sprayer were put onto an aseptic operation table in advance, and were sterilized via ultraviolet radiation for 30 minutes.
[0119] (3) 2566 competent cells were removed from −80° C. and put on ice to thaw (the quantity was calculated based on the number of transformations).
[0120] (4) A metal block of a 96-well plate was taken and put on ice, the 96-well PCR plate was put in the metal block, the competent cells were subpackaged, 50 μL of the competent cells was added to each well and the pipette tips should be prevented from contamination.
[0121] (5) The 96-well PCR plate was marked, and 0.5 L to 1 μL of the plasmids with corresponding numbers were separately added and the PCR plate was put on ice for 20 minutes to 30 minutes.
[0122] (6) A lid of the PCR machine was opened and the PCR plate was incubated at 42° C. for 90 seconds.
[0123] (7) The PCR plate was put on ice for 3 minutes.
[0124] (8) 100 μL of LB (at a concentration of 100 μg/mL) with Amp resistance was added, and

[0125] the PCR plate was incubated at 37° C. for 30 minutes to 45 minutes, and then transferred to a 96-well deep-well plate (600 μL to 1 mL of LB containing Amp was added), and the resulting mixture was oscillated at 700 rpm and cultured overnight at 37° C.
[0126] (9) A record form was made for strain storage. The table content included: strain name, corresponding well positions of each strain, 96-well plate number, culture time, operator, and various abnormal situations (no growth, wrong sample added, or the like).

### 2.3.2. Inducible Expression of High-Throughput Proteins

[0127] 2 48-well deep-well plates were taken and 4 mL of LB medium containing Amp (at a concentration of 100 μg/mL) was added to each well.

[0128] 100 μL of the bacteria solution cultured overnight was taken and transferred to a 48-well deep-well plate, the deep-well plate was marked, put on a thermostatic oscillator at 37° C., and oscillated at 700 rpm, an equal volume of 50% glycerol (sterilization) was added to the bacteria residue in the 96-well plate, and the bacteria were cryopreserved and stored at −20° C.

[0129] After 2.5 hours to 3 hours of incubation, 300 μL of bacteria solution were randomly taken from 4 wells on the outermost side of the 48-well plate, OD₆₀₀ was measured by using the microplate reader with ultrapure water as a control group. When OD₆₀₀ reached 0.8 to 0.9, IPTG at a final concentration of 0.5 mM (2 μL of 1 M/L IPTG solution was added) was added to each well, and the reaction was induced at room temperature overnight.

[0130] The next day, after overnight induction, the 48-well plate was put into a horizontal centrifuge and centrifuged at 4000 rpm for 30 minutes, the supernatant was immediately removed and discarded, and the plate was spun dry with great force (bacteria were attached very firmly to the bottom of the 48-well plate and did not fall off). The plate was stored −20° C.

[0131] A record form was made for inducible expression. The table content included: strain name, corresponding well positions of each strain, plate number, culture time, operator, and abnormal situations (no growth, no induction, wrong positions, or the like).

### 2.3.3. High-Throughput Crushing

[0132] (1) The 48-well plate containing bacteria was removed from the freezer and thawed, the water bath cauldron was turned on in advance and the temperature was set to 80° C., 700 μL of lysis buffer (20 mM Tris-HCl, 2.5 mM MgCl₂, pH=7.5@25° C.) was added to each well, and the bacteria was thoroughly suspended by repeatedly pipetting by using a multichannel pipette.
[0133] (2) The suspended bacteria solution was transferred to a 96-well deep-well plate (NEST).
[0134] (3) The 96-well plate was put at −80° C. for 45 minutes until completely frozen. The plate was removed, put on a small-sized oscillator at 37° C., and oscillated at 700 rpm for 40 minutes until completely thawed, and then the 96-well plate was put in an 80° C. water bath for 10 minutes.
[0135] (4) Step (3) was performed again.
[0136] (5) The 96-well plate was removed from the water bath cauldron, immediately put into −80° C. for 45 minutes until completely frozen, then removed and put on the small-sized thermostatic oscillator at 37° C., and oscillated at 700 rpm for 40 minutes until completely thawed. Freeze-thaw time in the foregoing process needs to be adjusted according to an actual situation.
[0137] (6) 100 μL of quartz sand was added to each well (via 100 μL PCR 8-tube strips), covered with a silica gel cap (sterilized), and put in the high-throughput tissue grinder (Wonbio), a metal cap was tightened, the resulting mixture was oscillated at 60 Hz for 60 s for a total of 5 times, the cover was opened to dissipate heat for at least 5 minutes after each oscillation to prevent the lysate solution from overflowing due to overheating after continuous oscillation.
[0138] (7) The resulting mixture was centrifuged at 4000 rpm for 30 minutes, a supernatant was transferred to a 96-well filter plate with the multichannel pipette (with a volume adjusted 500 μL), a liquid was gathered with a 96-well deep-well plate below, and the two plates were pasted and fixed with an adhesive tape, and centrifuged at 3000 rpm for 2 minutes to remove impurities (the precipitate was pipetted during the transfer).

### 2.3.4. High-Throughput Purification

[0139] (1) After 1.5 μL of DNase I (Abclonal) was added to each well, the 96-well plate was put on a small-sized oscillator at room temperature and oscillated at 700 rpm for 5 minutes for even mixing, and then the plate was kept in a 37° C. water bath for 2 hours.
[0140] (2) The 96-well plate was removed, DTT at a final concentration of 2 mM was added to each well (1 μL of DTT was added to 1 M/L stock solution), water bath temperature was set to 80° C., and after the temperature was stable, the 96-well plate was put in the water bath and inactivated for 30 minutes. After the plate was removed, the plate was cooled completely at 4° C. and centrifuged at 4000 rpm for 2 minutes.
[0141] (3) Preparation of DEAE Sepharose:

[0142] Equilibration buffer: 10 mM Tris-HC1, 190 mM Kcl, and 0.1 mM EDTA.

[0143] A suspension with a volume of 150 μL was added to the 96-well filter plate (pure padding volume=suspension volume×padding ratio), the liquid was gathered with a 96-well deep-well plate below, the resulting mixture was centrifuged at 3000 rpm for 2 minutes, the padding storage solution was discarded, 600 μL of ultrapure water was added to each well of the 96-well filter plate, the resulting mixture was centrifuged at 3000 rpm for 2 minutes, washed with water once, washed with the equilibration buffer once, and transferred to a new 96-well deep-well plate for loading.
[0144] (4) DEAE loading: A KCl solution (at final concentration of 190 mM, 34 μL of 3M KCl solution (Vetec) was added to each well) was added to an inactivated protein sample, put in a small-sized oscillator at room temperature, and oscillated at 700 rpm for 5 minutes to be mixed well. The samples were transferred to the balanced DEAE padding (in the 96-well filter plate) with the multichannel pipette in a one-to-one correspondence with the positions of the wells, then the 96-well filter plate and the 96-well deep-well plate for gathering liquid below were fixed with an adhesive tape, and put into a small-sized thermostatic oscillator at room temperature and oscillated at 1000 rpm for 2 hours. The samples were centrifuged at 3000 rpm for 2 minutes to obtain purified protein samples, and the purified protein samples were temporarily stored at 4° C.

### 2.3.5. SDS-PAGE Determination

[0145] Samples were taken from 96-well PCR plate for testing.
[0146] 1. Sample Preparation: 7 μL of proteins+7 μL of 2×SDS loading buffer
[0147] 2. Electrophoresis Conditions: Each of 15 wells was loaded with 10 μL of SDS-PAGE gel (a concentration of separation gel was 12%).

[0148] A constant voltage was set to 200V, electrophoresis was conducted for 36 minutes, and the samples were stained with Coomassie brilliant blue for 2 minutes, decolorized and photographed.
[0149] 3. Result Processing: The sample numbers and the positions on the plate (including numbers of the 96-well plates) were marked on the electrophoretogram, and expression states were collected.

### 2.3.6. Protein Concentration Determination

[0150] 1. The Bradford working solution was removed from the 4° C. freezer and put at room temperature before use.
[0151] 2. A 12-tube strip was taken and a standard substance was diluted according to Table 4 below.

TABLE 4

| | | | | | | | | | | | |
|---|---|---|---|---|---|---|---|---|---|---|---|
| 1 X PBS (μL) | 100 | 95 | 90 | 80 | 70 | 60 | 50 | 40 | 25 | 10 | 0 |
| 2 mg/mL BSA (μL) | 0 | 5 | 10 | 20 | 30 | 40 | 50 | 60 | 75 | 90 | 100 |
| Final concentration of BSA (mg/mL) | 0 | 0.1 | 0.2 | 0.4 | 0.6 | 0.8 | 1 | 1.2 | 1.5 | 1.8 | 2 |

[0152] 3. A 96-well microplate was taken, 10 μL of standard substance and sample were added to each well, and 1 duplication was configured for each standard substance and sample.
[0153] 4. 200 μL of the Bradford working solution was added to each well.
[0154] 5. The microplate was put into a microplate reader and oscillated for 30 s, and was left standing for 5 minutes to determine A595.
[0155] 6. An average of A595 in the standard group was used as the abscissa, and the corresponding protein concentration was used as the ordinate, and a standard curve was plotted in excel software.
[0156] 7. The protein concentration of the sample was calculated based on the average of A595 and the excel curve.

### Example 2 Application Test of Chimera Polymerase

[0157] The sequence tested in this example had SEQ ID NO: 278, and the magnesium ion tolerance, TE buffer tolerance, SDS tolerance, long fragment amplification capability and the polymerase were specifically detected.

### 1. Templates and Primers

[0158] The templates used in this example were Escherichia coli gDNA and human gDNA, and the target gene of Escherichia coli gDNA was 16S, and had a size of 400 bp to 500 bp (templates extracted from Tiangen kit); and a size of a target fragment of human gDNA was 0.5 kb to 10 kb (templates extracted from Tiangen kit).

[0159] The primers (SEQ ID NOs: 648 to 669, synthesized by Sangon Biotech) used in the test are shown in Table 5 below:

TABLE 5
Amplification primers

| | | | Product | |
|---|---|---|---|---|
| Template | Primer | Sequence | size | |
| E. coli | F | GACGCTCTTCCGATCTTATGGTAATTGTGTGCCA | 500 | bp |
| | | GCMGCCGCGGTAA | | |
| | R | TGTGCTCTTCCGATCTAGTCAGTCAGCCGGACT | | |
| | | ACHVGGGTWTCTAAT | | |
| Human | F | CCTCATTTGGGGAGGGGTTATCT | 1 | kb |
| | R | GGGGCACCTTCTCCAACTCATACT | | |
| Human | F | GGGGCACCTTCTCCAACTCATACT | 2 | kb |
| | R | CCTGAAACAAGGTTGTGGCATAGC | | |
| Human | F | ATGAGGCAAGATATGAGTGC | 3 | kb |
| | R | AATCTCTGGCCAGATGTGTTC | | |
| Human | F | ATGAGGCAAGATATGAGTGC | 4 | kb |
| | R | GTTCTAGAGTACAATGTGCACAATG | | |
| Human | F | ATGAGGCAAGATATGAGTGC | 5 | kb |
| | R | TGACCAAACTCCATCTTCTCTC | | |
| Human | F | ATGAGGCAAGATATGAGTGC | 6 | kb |
| | R | ATGACACTGATCCAGGGAC | | |
| Human | F | ATGAGGCAAGATATGAGTGC | 7 | kb |
| | R | TTGCCATGTAACATACTTGTACAC | | |
| Human | F | ATGAGGCAAGATATGAGTGC | 8 | kb |
| | R | TGGCTCATGTATCACACAATG | | |
| Human | F | ATGAGGCAAGATATGAGTGC | 9 | kb |
| | R | ACCTAAACCTTGCAATTGGG | | |
| Human | F | ATGAGGCAAGATATGAGTGC | 10 | kb |
| | R | TTGGCTATTCTTGTTGCTG | | |

### 2. PCR Reaction System

[0160] The foregoing templates and primers, dNTPs (source), enzyme, buffer (source), and PCR tubes were put on ice to prepare the reaction system shown in Table 6 below.

TABLE 6
PCR Reaction System

| Components | 50 μL | |
|---|---|---|
| 5X reaction buffer | 25 | μL |
| Upstream primer (10 μM) | 1 | μL |
| Downstream primer (10 μM) | 1 | μL |
| dNTP (10 mM) | 1 | μL |
| DNA template | 10 | ng |
| Polymerase | 50 | ng |

| | |
|---|---|
| Nuclease-free water | Diluted to 50 μL |

[0161] Components of 1× buffer solution: 20 mM Tris-HCl, pH of 8.8, 10 mM (NH₄)₂SO₄, 1.5 mM MgSO₄, and 100 mM KCl. A final concentration of dNTPs was 200 uM; and a final concentration of primers was 200 nM. The dosage of the template was 10 ng.

### 3. Reaction Process

[0162] The PCR reaction process is shown in Table 7 below. The following process was executed in a PCR machine (Eastwin, E811):

TABLE 7
PCR Reaction Process

| Steps | Temperature | Time | | Quantity of cycles |
|---|---|---|---|---|
| Pre-denaturation | 98° C. | 45 | s | 1 |
| Denaturation | 98° C. | 10 | s | 30 |
| annealing | 60° C. | 30 | s | |
| Extension* | 72° C. | 5 | min | |
| Final extension | 72° C. | 1-5 | min | 1 |

| | | | |
|---|---|---|---|
| Holding | 4° C.-12° C. | ∞ | 1 |

### 4. Test Results

[0163] 4.1. For a tolerance range for Mg2+, a final concentration was 0 mM MgCl₂ to 10 mM MgCl₂. The results are shown in FIG. 3.

[0164] 4.2. For a tolerance range for SDS, a final concentration was 0% SDS to 0.02% SDS. The results are shown in FIG. 4.

[0165] 4.3. For a tolerance range for a TE buffer was 0 to 1×. The results are shown in FIG. 5.

[0166] 4.4. For amplification of human gDNA, a maximum of 10 kb human gDNA could be amplified. The results are shown in FIG. 6.

[0167] The specific method and composition described herein represent preferred embodiments and are exemplary and are not intended to limit the scope of the present invention. Persons skilled in the art can figure out other objectives, aspects and embodiments after considering this specification and conclude that the objectives, aspects and embodiments are included within the spirit of the present invention defined by the scope of the claims. It is apparent to persons skilled in the art that various substitutions and modifications can be made to the present invention disclosed herein without departing from the scope and spirit of the present invention. The present invention illustratively described herein may be suitably practiced in the absence of any elements or limitations, which are not specifically disclosed herein as being necessary. Therefore, for example, in each example herein, any one of the terms such as “comprise”, “include”, and “contain” within the embodiments or examples of the present invention shall be interpreted in a broad sense without limitation. The steps described herein may be practiced in different step sequences, which are not necessarily limited to the step sequences indicated herein or in the claims. Unless otherwise expressly indicated in the context, “a” and “the” include plural forms and the plural forms include singular forms. In no event shall any statement made by any examiner or any other officer or employee of the Patent and Trademark Office be construed as a limitation on the patent unless such statement is explicit and is expressly adopted by the applicant in responsive writing without conditions or reservation.

[0168] The present invention is described broadly and generally. Each of narrower category and subcategory groups falling within the scope of the general disclosure range also forms a part of the present invention. The adopted terms and expressions are used as descriptive terms other than limitative terms, and the use of such terms and expressions is not intended to exclude any equivalents of the features shown and described, or parts thereof. However, it can be understood that various modifications may be made within the claimed scope of the present invention. Therefore, it should be understood that, although the present invention is specifically disclosed through preferred embodiments and optional features, persons skilled in the art may make modifications and variations to the concepts disclosed herein, and such modifications and variations may be regarded as limitations on the present invention, and fall within the scope of the present invention that is defined in the appended claims.

Nucleotide Sequence
SEQ ID NO: 575
atgattttagatgtggattacataactgaagaaggaaaacctgttattag
gctattcaaaaaagagaacggaaaatttaagatagagcatgatagaactt
ttagaccatacatttacgctcttctcagggatgattcaaagattgaagaa
gttaagaaaataacgggggaaaggcatggaaagattgtgagaattgttga
tgtagagaaggttgagaaaaagtttctcggcaagcctattaccgtgtgga
aactttatttggaacatccccaagatgttcccactattagagaaaaagtt
agagaacatccagcagttgtggacatcttcgaatacgatattccatttgc
aaagagatacctcatcgacaaaggcctaataccaatggagggggaagaag
agctaaagattcttgccttcgatatagaaaccctctatcacgaaggagaa
gagtttggaaaaggcccaattataatgattagttatgcagatgaaaatga
agcaaaggtgattacttggaaaaacatagatcttccatacgttgaggttg
tatcaagcgagagagagatgataaagagatttctcaggattatcagggag
aaggatcctgacattatagttacttataatggagactcattcgacttccc
atatttagcgaaaagggcagaaaaacttgggattaaattaaccattggaa
gagatggaagcgagcccaagatgcagagaataggcgatatgacggctgta
gaagtcaagggaagaatacatttcgacttgtatcatgtaataacaaggac
aataaatctcccaacatacacactagaggctgtatatgaagcaatttttg
gaaagccaaaggagaaggtatacgccgacgagatagcaaaagcctgggaa
agtggagagaaccttgagagagttgccaaatactcgatggaagatgcaaa
ggcaacttatgaactcgggaaagaattccttccaatggaaattcagcttt
caagattagttggacaacctttatgggatgtttcaaggtcaagcacaggg
aaccttgtagagtggttcttacttaggaaagcctacgaaagaaacgaagt
agctccaaacaagccaagtgaagaggagtatcaaagaaggctcagggaga
gctacacaggtggattcgttaaagagccagaaaaggggttgtgggaaaac
atagtatacctagattttagagccctatatccctcgattataattaccca
caatgtttctcccgatactctaaatcttgagggatgcaagaactatgata
tcgctcctcaagtaggccacaagttctgcaaggacatccctggttttata
ccaagtctcttgggacatttgttagaggaaagacaaaagattaagacaaa
aatgaaggaaactcaagatcctatagaaaaaatactccttgactatagac
aaaaagcgataaaactcttagcaaattctttctacggatattatggctat
gcaaaagcaagatggtactgtaaggagtgtgctgagagcgttactgcctg
gggaagaaagtacatcgagttagtatggaaggagctcgaagaaaagtttg
gatttaaagtcctctacattgacactgatggtctctatgcaactatccca
ggaggagaaagtgaggaaataaagaaaaaggctctagaatttgtaaaata
cataaattcaaagctccctggactgctagagcttgaatatgaagggtttt
ataagaggggattcttcgttacgaagaagaggtatgcagtaatagatgaa
gaaggaaaagtcattactcgtggtttagagatagttaggagagattggag
tgaaattgcaaaagaaactcaagctagagttttggagacaatactaaaac
acggagatgttgaagaagctgtgagaatagtaaaagaagtaatacaaaag
cttgccaattatgaaattccaccagagaagctcgcaatatatgagcagat
aacaagaccattacatgagtataaggcgataggtcctcacgtagctgttg
caaagaaactagctgctaaaggagttaaaataaagccaggaatggtaatt
ggatacatagtacttagaggcgatggtccaattagcaatagggcaattct
agctgaggaatacgatcccaaaaagcacaagtatgacgcagaatattaca
ttgagaaccaggttcttccagcggtacttaggatattggagggatttgga
tacagaaaggaagacctcagataccaaaagacaagacaagtcggcctaac
ttcctggcttaacattaaaaaatcctag

The application's sequence listing, which the Patent Office published only in electronic form, follows.

SEQUENCE LISTING (669 sequences)

SEQ ID NO: 1 - DNA, 2331 bp, Artificial Sequence
  Synthetic
atgatcttagatgcagattatatcacggaagaaggcaaaccagtgattcgcctgtttaaaaaagaaaatggcgaatttaaaatcgaacatgatcgcacctttcgcccgtatatctatgccctgctgaaagatgatagtaaaatcgaagaagttaagaaaatcacagcggaacgtcatggtaaaattgttcgcatcgttgatgcggaaaaagttgaaaagaaatttctgggtcgtcctattacagtttggcgtctgtattttgaacatcctcaggatgttccgacgattcgcgaaaaaatccgcgaacatagcgccgttgtggacatatttgaatatgatattccgtttgccaaacgctatctgattgataaaggtttaatccctatggaaggcgatgaagaactgaaactgttagcgtttgacatcgaaaccctgtatcatgaaggtgaagaatttggcaaaggcccgatcatcatgatctcttatgcagatgaagaagaagctaaagtgatcacttggaagaagatcgatttaccgtatgttgaagttgtgtctagtgaacgcgaaatgatcaaacgctttctgaaaatcattcgcgaaaaagatccggatattatcattacctataatggtgatagctttgatttaccttatttagccaaacgtgccgaaaaactgggcatcaaactgacgatcggtcgtgatggtagcgaacctaaaatgcagcgcatcggcgatatgacagcagttgaagttaaaggtcgcatccattttgatctgtatcatgttattcgtcgtacaatcaatttaccgacctataccctggaagcagtgtatgaagccatctttggtaaacctaaagaaaaagtgtatgcggatgaaattgctaaagcttgggaaacgggcgaaggcttagaacgcgttgctaaatatagcatggaagatgccaaagctacctatgaactgggcaaagaatttttccctatggaagctcagctgagtcgtctggtgggtcagcctctgtgggatgtgagtcgtagtagtacgggcaatctggtggagtggtttctgctgcgtaaagcgtacgaacgtaacgagttagcacctaacaaaccggatgaacgcgaatatgaacgccgcctgcgtgaatcttatgcaggcggttttgttaaagaaccggaaaaaggcctgtgggaaaatattgtgtctctggattttcgtgcactgtatccgagcatcatcattacacataatgtgtctccagataccctgaatcgcgaaggttgtcgtaattatgatgttgctccggaagtgggtcataaattttgcaaagattttccaggttttattccgagtctgctgaaacgcttactggatgaacgtcagaaaatcaaaaccaaaatgaaagcctcacaggatcctatcgaaaaaatcatgttagattatcgtcagcgtgccatcaaaattctggccaatagctattatggctattatggctatgctaaagctcgctggtattgcaaagaatgcgccgaatcagtgaccgcttggggtcgcgaatatatcgaatttgtgtggaaagaactggaagaaaaatttggctttaaagttctgtatatcgataccgatggcctgtatgcgaccattccgggtggtaaatctgaagaaattaagaagaaggccttagaatttgtggattatattaatgccaaactgccgggcctgctggaactggaatatgaaggcttttataaacgcggcttcttcgtgaccaagaaaaaatatgcactgatcgatgaagaaggtaaaatcattacacgtggcctggagattgttcgtcgtgactggagcgaaatcgcgaaagaaacccaggcccgtgttctggaagcactgctgaaagatggtaatgtcgaagaagcagtgagtattgttaaagaagtcacggaaaaactgtccaagtatgaagtcccgccggaaaaactggtgattcatgaacaaatcacccgcgaactgaaagattacaaggcgacgggcccgcacgtggcaattgctaaacgtctggcagcgcgtggcgttaagatccgtccgggtaccgttattagctatatcgtcctgaaaggctctggtcgtattggtgaccgcgccatcccgtttgatgaattcgacccggctaaacaccgctacgatgcggaatattacattgaaaatcaggtcctgccggctgtggaacgtatcctgaaagcgtttggctatcgtaaggaagatctgcgctaccagaaaacccgtcaagtgggcctgggtgcgtggctgaaaccgaagggtaaaaagtaa

SEQ ID NO: 2 - DNA, 2327 bp, Artificial Sequence
  Synthetic
atgatcttagatgcagattatatcacggaagaaggcaaaccagtgattcgcctgtttaaaaaagaaaatggcgaatttaaaatcgaacatgatcgcacctttcgcccgtatatctatgccctgctgaaagatgatagtaaaatcgaagaagttaagaaaatcacagcggaacgtcatggtaaaattgttcgcatcgttgatgcggaaaaagttgaaaagaaatttctgggtcgtcctattacagtttggcgtctgtattttgaacatcctcaggatgttccgacgattcgcgaaaaaatccgcgaacatagcgccgttgtggacatatttgaatatgatattccgtttgccaaacgctatctgattgataaaggtttaatccctatggaaggcgatgaagaactgaaactgttagcgtttgacatcgaaaccctgtatcatgaaggtgaagaatttggcaaaggcccgatcatcatgatctcttatgcagatgaagaagaagctaaagtgatcacttggaagaagatcgatttaccgtatgttgaagttgtgtctagtgaacgcgaaatgatcaaacgctttctgaaaatcattcgcgaaaaagatccggatattatcattacctataatggtgatagctttgatttaccttatttagccaaacgtgccgaaaaactgggcatcaaactgacgatcggtcgtgatggtagcgaacctaaaatgcagcgcatcggcgatatgacagcagttgaagttaaaggtcgcatccattttgatctgtatcatgttattcgtcgtacaatcaatttaccgacctataccctggaagcagtgtatgaagccatctttggtaaacctaaagaaaaagtgtatgcggatgaaattgctaaagcttgggaaacgggcgaaggcttagaacgcgttgctaaatatagcatggaagatgccaaagctacctatgaactgggcaaagaatttttccctatggaagctcagctgagtcgtctggtgggtcagcctctgtgggatgtgagtcgtagtagtacgggcaatctggtggagtggtttctgctgcgtaaagcgtacgaacgtaacgagttagcacctaacaaaccggatgaacgcgaatatgaacgccgcctgcgtgaatcttatgcaggcggttttgttaaagaaccggaaaaaggcctgtgggaaaatattgtgtctctggattttcgtgcactgtatccgagcatcatcattacacataatgtgtctccagataccctgaatcgcgaaggttgtcgtaattatgatgttgctccggaagtgggtcataaattttgcaaagattttccaggttttattccgagtctgctgaaacgcttactggatgaacgtcagaaaatcaaaaccaaaatgaaagcctcacaggatcctatcgaaaaaatcatgttagattatcgtcagcgtgccatcaaaattctggccaatagctattatggctattatggctatgctaaagctcgctggtattgcaaagaatgcgccgaatcagtgaccgcttggggtcgcgaatatatcgaatttgtgtggaaagaactggaagaaaaatttggctttaaagttctgtatatcgataccgatggcctgtatgcgaccattccgggtggtaaatctgaagaaattaagaagaaggccttagaatttgtggattatattaatgccaaactgccgggcctgctggaactggaatatgaaggcttttataaacgcggcttcttcgtgaccaagaaaaaatatgcactgatcgatgaagaaggtaaaatcattacacgtggcctggagattgttcgtcgtgactggagcgaaatcgcgaaagagacccaggcgcgtgtgctggaagcgctgctgaaggacggtgatgttgagaaagcggttcgtatcgtgaaggaagttaccgagaagctgagcaaatacgaagtgccgccggagaagctggttattcacgaacaaatcacccgtgacctgaaggattataaagcgaccggtccgcacgtggcggttgcgaaacgtctggcggcgcgtggtgtgaagatccgtccgggcaccgtgattagctacatcgttctgaaaggtagcggccgtattggcgatcgtgcgatcccgttcgacgagtttgatccgaccaagcacaaatatgacgcggaatactatattgagaaccaggtgctgccggcggttgaacgtatcctgcgtgcgttcggttaccgtaaagaggacctgcgttatcagaagacccgtcaagttggtctgagcgcgtggctgaagccgaaaggcaccta

SEQ ID NO: 3 - DNA, 2325 bp, Artificial Sequence
  Synthetic
atgatcttagatgcagattatatcacggaagaaggcaaaccagtgattcgcctgtttaaaaaagaaaatggcgaatttaaaatcgaacatgatcgcacctttcgcccgtatatctatgccctgctgaaagatgatagtaaaatcgaagaagttaagaaaatcacagcggaacgtcatggtaaaattgttcgcatcgttgatgcggaaaaagttgaaaagaaatttctgggtcgtcctattacagtttggcgtctgtattttgaacatcctcaggatgttccgacgattcgcgaaaaaatccgcgaacatagcgccgttgtggacatatttgaatatgatattccgtttgccaaacgctatctgattgataaaggtttaatccctatggaaggcgatgaagaactgaaactgttagcgtttgacatcgaaaccctgtatcatgaaggtgaagaatttggcaaaggcccgatcatcatgatctcttatgcagatgaagaagaagctaaagtgatcacttggaagaagatcgatttaccgtatgttgaagttgtgtctagtgaacgcgaaatgatcaaacgctttctgaaaatcattcgcgaaaaagatccggatattatcattacctataatggtgatagctttgatttaccttatttagccaaacgtgccgaaaaactgggcatcaaactgacgatcggtcgtgatggtagcgaacctaaaatgcagcgcatcggcgatatgacagcagttgaagttaaaggtcgcatccattttgatctgtatcatgttattcgtcgtacaatcaatttaccgacctataccctggaagcagtgtatgaagccatctttggtaaacctaaagaaaaagtgtatgcggatgaaattgctaaagcttgggaaacgggcgaaggcttagaacgcgttgctaaatatagcatggaagatgccaaagctacctatgaactgggcaaagaatttttccctatggaagctcagctgagtcgtctggtgggtcagcctctgtgggatgtgagtcgtagtagtacgggcaatctggtggagtggtttctgctgcgtaaagcgtacgaacgtaacgagctggcaccgaataaaccgtccggccgcgaatacgatgaacgtcgcggcggttatgcgggcggttacgttaaagaaccggaaaagggtctgtgggaaaacatcgtctacctggattacaagagtctgtatccgtccattatcattacccataacgttagtccggacacgctgaatcgcgaaggctgcaaagaatacgatgtggcgccgcaggttggtcaccgtttttgtaaagactttccgggcttcattccgtccctgctgggtgatctgctggaagaacgtcagaaaatcaagcgcaaaatgaaggccaccattgatccgatcgaacgtcgcctgctggactatcgtcaacgcgcgatcaaaattctggccaacagctattacggctattacggttatgcgcgtgcccgctggtactgcaaagaatgtgcagaaagcgttacggcttggggccgcgaatacatcgaaatgtctatccgtgaaatcgaagaaaagtacggtttcaaggtgctgtacgctgataccgacggcttccatgcgacgattccgggtgaagatgccgaaaccatcaaaaagaaagcaatggaattcctgaagtacatcaactcaaagctgccgggcgccctggaactggaatatgaaggcttctaccgtcgcggctttttcgttacgaagaaaaagtacgcagtcattgacgaagaaggcaaaatcaccacgcgtggcctggagattgttcgtcgtgactggagcgaaatcgcgaaagaaacccaggcccgcgttctggaagccatcctgaaacatggtaatgtggaagaagcagttcgcattgttaaagaagtgacacagaaactgagcaaatatgaaatcccaccggaaaaactggccatctatgaacagattacacgtccactgcatgaatataaagccattggtccacatgttgcggttgccaaacgcttagccgctaaaggtgttaaaatcaaaccaggcatggttatcggctatattgttctgcgcggcgatggtccgatctctaatcgtgccatcttagcggaagaatatgatccacgcaaacataaatatgatgccgaatattatatcgaaaatcaggtgttaccagcagtgctgcgcattctggaaggctttggctatcgcaaagaagatttacgttggcagaaaaccaaacagacgggcctgacaagttggctgaatattaaaaaatcataa

SEQ ID NO: 4 - DNA, 2328 bp, Artificial Sequence
  Synthetic
atgatcttagatgcagattatatcacggaagaaggcaaaccagtgattcgcctgtttaaaaaagaaaatggcgaatttaaaatcgaacatgatcgcacctttcgcccgtatatctatgccctgctgaaagatgatagtaaaatcgaagaagttaagaaaatcacagcggaacgtcatggtaaaattgttcgcatcgttgatgcggaaaaagttgaaaagaaatttctgggtcgtcctattacagtttggcgtctgtattttgaacatcctcaggatgttccgacgattcgcgaaaaaatccgcgaacatagcgccgttgtggacatatttgaatatgatattccgtttgccaaacgctatctgattgataaaggtttaatccctatggaaggcgatgaagaactgaaactgttagcgtttgacatcgaaaccctgtatcatgaaggtgaagaatttggcaaaggcccgatcatcatgatctcttatgcagatgaagaagaagctaaagtgatcacttggaagaagatcgatttaccgtatgttgaagttgtgtctagtgaacgcgaaatgatcaaacgctttctgaaaatcattcgcgaaaaagatccggatattatcattacctataatggtgatagctttgatttaccttatttagccaaacgtgccgaaaaactgggcatcaaactgacgatcggtcgtgatggtagcgaacctaaaatgcagcgcatcggcgatatgacagcagttgaagttaaaggtcgcatccattttgatctgtatcatgttattcgtcgtacaatcaatttaccgacctataccctggaagcagtgtatgaagccatctttggtaaacctaaagaaaaagtgtatgcggatgaaattgctaaagcttgggaaacgggcgaaggcttagaacgcgttgctaaatatagcatggaagatgccaaagctacctatgaactgggcaaagaatttttccctatggaagctcagctgagtcgtctggtgggtcagcctctgtgggatgtgagtcgtagtagtacgggcaatctggtggagtggtttctgctgcgtaaagcgtacgaacgtaacgaggttgcgccgaacaagccgagcgaggaagagtaccagcgtcgtctgcgtgagagctataccggtggcttcgtgaaggaaccggagaaaggcctgtgggaaaacattgtttacctggattttcacgcgctgtatccgagcatcattatcacccacaacgtgagcccggataccctgaacctggagggttgcaagaactacgacatcgcgccgcaggttggccacaagttctgcaaagacattccgggttttatcccgagcctgctgggccacctgctggaagagcgtcagaagattaaaaccaagatgaaagaaacccaagacccgattgagaaaatcctgctggattaccgtcaaaaggcgatcaaactgctggcgaacagcttctacggttactatggctatgcgaaggcgcgttggtactgcaaagaatgcgcggagagcgtgaccgcgtggggtcgtaaatatattgaactggtttggaaggagctggaagagaagttcggttttaaagtgctgtacatcgacaccgatggcctgtatgcgaccattccgggtggcgaaagcgaagagatcaagaaaaaggcgctggagtttctgaagtacatcaacgcgaaactgccgggcgcgctggaactggagtacgaaggtttctataaacgtggcctgtttgtgaccaaaaagaaatatgcggttattgatgaagagggtaaaatcaccacccgtggcctggagattgttcgtcgtgactggagcgaaatcgcgaaagaaacccaggcccgcgttctggaagccatcctgaaacatggtaatgtggaagaagcagttcgcattgttaaagaagtgacacagaaactgagcaaatatgaaatcccaccggaaaaactggccatctatgaacagattacacgtccactgcatgaatataaagccattggtccacatgttgcggttgccaaacgcttagccgctaaaggtgttaaaatcaaaccaggcatggttatcggctatattgttctgcgcggcgatggtccgatctctaatcgtgccatcttagcggaagaatatgatccacgcaaacataaatatgatgccgaatattatatcgaaaatcaggtgttaccagcagtgctgcgcattctggaaggctttggctatcgcaaagaagatttacgttggcagaaaaccaaacagacgggcctgacaagttggctgaatattaaaaaatcataa

SEQ ID NO: 5 - DNA, 2328 bp, Artificial Sequence
  Synthetic
atgatcttagatgcagattatatcacggaagaaggcaaaccagtgattcgcctgtttaaaaaagaaaatggcgaatttaaaatcgaacatgatcgcacctttcgcccgtatatctatgccctgctgaaagatgatagtaaaatcgaagaagttaagaaaatcacagcggaacgtcatggtaaaattgttcgcatcgttgatgcggaaaaagttgaaaagaaatttctgggtcgtcctattacagtttggcgtctgtattttgaacatcctcaggatgttccgacgattcgcgaaaaaatccgcgaacatagcgccgttgtggacatatttgaatatgatattccgtttgccaaacgctatctgattgataaaggtttaatccctatggaaggcgatgaagaactgaaactgttagcgtttgacatcgaaaccctgtatcatgaaggtgaagaatttggcaaaggcccgatcatcatgatctcttatgcagatgaagaagaagctaaagtgatcacttggaagaagatcgatttaccgtatgttgaagttgtgtctagtgaacgcgaaatgatcaaacgctttctgaaaatcattcgcgaaaaagatccggatattatcattacctataatggtgatagctttgatttaccttatttagccaaacgtgccgaaaaactgggcatcaaactgacgatcggtcgtgatggtagcgaacctaaaatgcagcgcatcggcgatatgacagcagttgaagttaaaggtcgcatccattttgatctgtatcatgttattcgtcgtacaatcaatttaccgacctataccctggaagcagtgtatgaagccatctttggtaaacctaaagaaaaagtgtatgcggatgaaattgctaaagcttgggaaacgggcgaaggcttagaacgcgttgctaaatatagcatggaagatgccaaagctacctatgaactgggcaaagaatttttccctatggaagctcagctgagtcgtctggtgggtcagcctctgtgggatgtgagtcgtagtagtacgggcaatctggtggagtggtttctgctgcgtaaagcgtacgaacgtaacgagctggcaccgaataaaccgtccggccgcgaatacgatgaacgtcgcggcggttatgcgggcggttacgttaaagaaccggaaaagggtctgtgggaaaacatcgtctacctggattacaagagtctgtatccgtccattatcattacccataacgttagtccggacacgctgaatcgcgaaggctgcaaagaatacgatgtggcgccgcaggttggtcaccgtttttgtaaagactttccgggcttcattccgtccctgctgggtgatctgctggaagaacgtcagaaaatcaagcgcaaaatgaaggccaccattgatccgatcgaacgtcgcctgctggactatcgtcaacgcgcgatcaaaattctggccaacagctattacggctattacggttatgcgcgtgcccgctggtactgcaaagaatgtgcagaaagcgttacggcttggggccgcgaatacatcgaaatgtctatccgtgaaatcgaagaaaagtacggtttcaaggtgctgtacgctgataccgacggcttccatgcgacgattccgggtgaagatgccgaaaccatcaaaaagaaagcaatggaattcctgaagtacatcaactcaaagctgccgggcgccctggaactggaatatgaaggcttctaccgtcgcggctttttcgttacgaagaaaaagtacgcagtcattgacgaagaaggcaaaatcaccacgcgtggcctggagattgttcgtcgtgactggagcgaaatcgcgaaagaaacccaggcccgtgttctggaagcactgctgaaagatggtaatgtcgaagaagcagtgagtattgttaaagaagtcacggaaaaactgtccaagtatgaagtcccgccggaaaaactggtgattcatgaacaaatcacccgcgaactgaaagattacaaggcgacgggcccgcacgtggcaattgctaaacgtctggcagcgcgtggcgttaagatccgtccgggtaccgttattagctatatcgtcctgaaaggctctggtcgtattggtgaccgcgccatcccgtttgatgaattcgacccggctaaacaccgctacgatgcggaatattacattgaaaatcaggtcctgccggctgtggaacgtatcctgaaagcgtttggctatcgtaaggaagatctgcgctaccagaaaacccgtcaagtgggcctgggtgcgtggctgaaaccgaagggtaaaaagtaa

SEQ ID NO: 6 - DNA, 2328 bp, Artificial Sequence
  Synthetic
atgatcttagatgcagattatatcacggaagaaggcaaaccagtgattcgcctgtttaaaaaagaaaatggcgaatttaaaatcgaacatgatcgcacctttcgcccgtatatctatgccctgctgaaagatgatagtaaaatcgaagaagttaagaaaatcacagcggaacgtcatggtaaaattgttcgcatcgttgatgcggaaaaagttgaaaagaaatttctgggtcgtcctattacagtttggcgtctgtattttgaacatcctcaggatgttccgacgattcgcgaaaaaatccgcgaacatagcgccgttgtggacatatttgaatatgatattccgtttgccaaacgctatctgattgataaaggtttaatccctatggaaggcgatgaagaactgaaactgttagcgtttgacatcgaaaccctgtatcatgaaggtgaagaatttggcaaaggcccgatcatcatgatctcttatgcagatgaagaagaagctaaagtgatcacttggaagaagatcgatttaccgtatgttgaagttgtgtctagtgaacgcgaaatgatcaaacgctttctgaaaatcattcgcgaaaaagatccggatattatcattacctataatggtgatagctttgatttaccttatttagccaaacgtgccgaaaaactgggcatcaaactgacgatcggtcgtgatggtagcgaacctaaaatgcagcgcatcggcgatatgacagcagttgaagttaaaggtcgcatccattttgatctgtatcatgttattcgtcgtacaatcaatttaccgacctataccctggaagcagtgtatgaagccatctttggtaaacctaaagaaaaagtgtatgcggatgaaattgctaaagcttgggaaacgggcgaaggcttagaacgcgttgctaaatatagcatggaagatgccaaagctacctatgaactgggcaaagaatttttccctatggaagctcagctgagtcgtctggtgggtcagcctctgtgggatgtgagtcgtagtagtacgggcaatctggtggagtggtttctgctgcgtaaagcgtacgaacgtaacgaggttgcgccgaacaagccgagcgaggaagagtaccagcgtcgtctgcgtgagagctataccggtggcttcgtgaaggaaccggagaaaggcctgtgggaaaacattgtttacctggattttcacgcgctgtatccgagcatcattatcacccacaacgtgagcccggataccctgaacctggagggttgcaagaactacgacatcgcgccgcaggttggccacaagttctgcaaagacattccgggttttatcccgagcctgctgggccacctgctggaagagcgtcagaagattaaaaccaagatgaaagaaacccaagacccgattgagaaaatcctgctggattaccgtcaaaaggcgatcaaactgctggcgaacagcttctacggttactatggctatgcgaaggcgcgttggtactgcaaagaatgcgcggagagcgtgaccgcgtggggtcgtaaatatattgaactggtttggaaggagctggaagagaagttcggttttaaagtgctgtacatcgacaccgatggcctgtatgcgaccattccgggtggcgaaagcgaagagatcaagaaaaaggcgctggagtttctgaagtacatcaacgcgaaactgccgggcgcgctggaactggagtacgaaggtttctataaacgtggcctgtttgtgaccaaaaagaaatatgcggttattgatgaagagggtaaaatcaccacccgtggcctggagattgttcgtcgtgactggagcgaaatcgcgaaagagacccaggcgcgtgtgctggaagcgctgctgaaggacggtgatgttgagaaagcggttcgtatcgtgaaggaagttaccgagaagctgagcaaatacgaagtgccgccggagaagctggttattcacgaacaaatcacccgtgacctgaaggattataaagcgaccggtccgcacgtggcggttgcgaaacgtctggcggcgcgtggtgtgaagatccgtccgggcaccgtgattagctacatcgttctgaaaggtagcggccgtattggcgatcgtgcgatcccgttcgacgagtttgatccgaccaagcacaaatatgacgcggaatactatattgagaaccaggtgctgccggcggttgaacgtatcctgcgtgcgttcggttaccgtaaagaggacctgcgttatcagaagacccgtcaagttggtctgagcgcgtggctgaagccgaaaggcacctaa

SEQ ID NO: 7 - DNA, 2331 bp, Artificial Sequence
  Synthetic
atgatcttagatgcagattatatcacggaagaaggcaaaccagtgattcgcctgtttaaaaaagaaaatggcgaatttaaaatcgaacatgatcgcacctttcgcccgtatatctatgccctgctgaaagatgatagtaaaatcgaagaagttaagaaaatcacagcggaacgtcatggtaaaattgttcgcatcgttgatgcggaaaaagttgaaaagaaatttctgggtcgtcctattacagtttggcgtctgtattttgaacatcctcaggatgttccgacgattcgcgaaaaaatccgcgaacatagcgccgttgtggacatatttgaatatgatattccgtttgccaaacgctatctgattgataaaggtttaatccctatggaaggcgatgaagaactgaaactgttagcgtttgacatcgaaaccctgtatcatgaaggtgaagaatttggcaaaggcccgatcatcatgatctcttatgcagatgaagaagaagctaaagtgatcacttggaagaagatcgatttaccgtatgttgaagttgtgtctagtgaacgcgaaatgatcaaacgctttctgaaaatcattcgcgaaaaagatccggatattatcattacctataatggtgatagctttgatttaccttatttagccaaacgtgccgaaaaactgggcatcaaactgacgatcggtcgtgatggtagcgaacctaaaatgcagcgcatcggcgatatgacagcagttgaagttaaaggtcgcatccattttgatctgtatcatgttattcgtcgtacaatcaatttaccgacctataccctggaagcagtgtatgaagccatctttggtaaacctaaagaaaaagtgtatgcggatgaaattgctaaagcttgggaaacgggcgaaggcttagaacgcgttgctaaatatagcatggaagatgccaaagctacctatgaactgggcaaagaatttttccctatggaagctcagctgagtcgtctggtgggtcagcctctgtgggatgtgagtcgtagtagtacgggcaatctggtggagtggtttctgctgcgtaaagcgtacgaacgtaacgaggttgcgccgaacaagccgagcgaggaagagtaccagcgtcgtctgcgtgagagctataccggtggcttcgtgaaggaaccggagaaaggcctgtgggaaaacattgtttacctggattttcacgcgctgtatccgagcatcattatcacccacaacgtgagcccggataccctgaacctggagggttgcaagaactacgacatcgcgccgcaggttggccacaagttctgcaaagacattccgggttttatcccgagcctgctgggccacctgctggaagagcgtcagaagattaaaaccaagatgaaagaaacccaagacccgattgagaaaatcctgctggattaccgtcaaaaggcgatcaaactgctggcgaacagcttctacggttactatggctatgcgaaggcgcgttggtactgcaaagaatgcgcggagagcgtgaccgcgtggggtcgtaaatatattgaactggtttggaaggagctggaagagaagttcggttttaaagtgctgtacatcgacaccgatggcctgtatgcgaccattccgggtggcgaaagcgaagagatcaagaaaaaggcgctggagtttctgaagtacatcaacgcgaaactgccgggcgcgctggaactggagtacgaaggtttctataaacgtggcctgtttgtgaccaaaaagaaatatgcggttattgatgaagagggtaaaatcaccacccgtggcctggagattgttcgtcgtgactggagcgaaatcgcgaaagaaacccaggcccgtgttctggaagcactgctgaaagatggtaatgtcgaagaagcagtgagtattgttaaagaagtcacggaaaaactgtccaagtatgaagtcccgccggaaaaactggtgattcatgaacaaatcacccgcgaactgaaagattacaaggcgacgggcccgcacgtggcaattgctaaacgtctggcagcgcgtggcgttaagatccgtccgggtaccgttattagctatatcgtcctgaaaggctctggtcgtattggtgaccgcgccatcccgtttgatgaattcgacccggctaaacaccgctacgatgcggaatattacattgaaaatcaggtcctgccggctgtggaacgtatcctgaaagcgtttggctatcgtaaggaagatctgcgctaccagaaaacccgtcaagtgggcctgggtgcgtggctgaaaccgaagggtaaaaagtaa

SEQ ID NO: 8 - DNA, 2325 bp, Artificial Sequence
  Synthetic
atgatcttagatgcagattatatcacggaagaaggcaaaccagtgattcgcctgtttaaaaaagaaaatggcgaatttaaaatcgaacatgatcgcacctttcgcccgtatatctatgccctgctgaaagatgatagtaaaatcgaagaagttaagaaaatcacagcggaacgtcatggtaaaattgttcgcatcgttgatgcggaaaaagttgaaaagaaatttctgggtcgtcctattacagtttggcgtctgtattttgaacatcctcaggatgttccgacgattcgcgaaaaaatccgcgaacatagcgccgttgtggacatatttgaatatgatattccgtttgccaaacgctatctgattgataaaggtttaatccctatggaaggcgatgaagaactgaaactgttagcgtttgacatcgaaaccctgtatcatgaaggtgaagaatttggcaaaggcccgatcatcatgatctcttatgcagatgaagaagaagctaaagtgatcacttggaagaagatcgatttaccgtatgttgaagttgtgtctagtgaacgcgaaatgatcaaacgctttctgaaaatcattcgcgaaaaagatccggatattatcattacctataatggtgatagctttgatttaccttatttagccaaacgtgccgaaaaactgggcatcaaactgacgatcggtcgtgatggtagcgaacctaaaatgcagcgcatcggcgatatgacagcagttgaagttaaaggtcgcatccattttgatctgtatcatgttattcgtcgtacaatcaatttaccgacctataccctggaagcagtgtatgaagccatctttggtaaacctaaagaaaaagtgtatgcggatgaaattgctaaagcttgggaaacgggcgaaggcttagaacgcgttgctaaatatagcatggaagatgccaaagctacctatgaactgggcaaagaatttttccctatggaagctcagctgagtcgtctggtgggtcagcctctgtgggatgtgagtcgtagtagtacgggcaatctggtggagtggtttctgctgcgtaaagcgtacgaacgtaacgagctggcaccgaataaaccgtccggccgcgaatacgatgaacgtcgcggcggttatgcgggcggttacgttaaagaaccggaaaagggtctgtgggaaaacatcgtctacctggattacaagagtctgtatccgtccattatcattacccataacgttagtccggacacgctgaatcgcgaaggctgcaaagaatacgatgtggcgccgcaggttggtcaccgtttttgtaaagactttccgggcttcattccgtccctgctgggtgatctgctggaagaacgtcagaaaatcaagcgcaaaatgaaggccaccattgatccgatcgaacgtcgcctgctggactatcgtcaacgcgcgatcaaaattctggccaacagctattacggctattacggttatgcgcgtgcccgctggtactgcaaagaatgtgcagaaagcgttacggcttggggccgcgaatacatcgaaatgtctatccgtgaaatcgaagaaaagtacggtttcaaggtgctgtacgctgataccgacggcttccatgcgacgattccgggtgaagatgccgaaaccatcaaaaagaaagcaatggaattcctgaagtacatcaactcaaagctgccgggcgccctggaactggaatatgaaggcttctaccgtcgcggctttttcgttacgaagaaaaagtacgcagtcattgacgaagaaggcaaaatcaccacgcgtggcctggagattgttcgtcgtgactggagcgaaatcgcgaaagagacccaggcgcgtgtgctggaagcgctgctgaaggacggtgatgttgagaaagcggttcgtatcgtgaaggaagttaccgagaagctgagcaaatacgaagtgccgccggagaagctggttattcacgaacaaatcacccgtgacctgaaggattataaagcgaccggtccgcacgtggcggttgcgaaacgtctggcggcgcgtggtgtgaagatccgtccgggcaccgtgattagctacatcgttctgaaaggtagcggccgtattggcgatcgtgcgatcccgttcgacgagtttgatccgaccaagcacaaatatgacgcggaatactatattgagaaccaggtgctgccggcggttgaacgtatcctgcgtgcgttcggttaccgtaaagaggacctgcgttatcagaagacccgtcaagttggtctgagcgcgtggctgaagccgaaaggcacctaa

SEQ ID NO: 9 - DNA, 2325 bp, Artificial Sequence
  Synthetic
atgattctggacgctgactatattacggaaaatggcaagccggttgtgcgcatcttcaaaaaggaaaatggcgaattcaaggtggaatatgatcgcaactttgaaccgtatatttacgccctgctgaaagatgacagtgcaatcgaagaaattaaaaagatcaccgccgaacgccatggcaccgtggttcgtatcacgaaagcagaaaaggttgaacgtaaatttctgggtcgcccggtggaagtttggaaactgtatttcacgcatccgcaggatgtgccggccattcgtgacaaaatccgctctcacccggcagtcgtggatatttatgaatacgacatcccgtttgccaaacgttatctgattgataagggcctggttccgatggaaggtgacgaagaactgaaaatgctggcttttgatatcgaaaccctgtatcacgaaggcgaagaattcgcggaaggtccgattctgatgatctcatacgcagacgaatcggaagctcgcgtgattacctggaaaaaggttgatctgccgtatgttgacgctgtcagcacggaaaaagatatgattaaggcgtttctgcgtgttgtcaaagaaaaggatccggacgttctgatcacctataacggcgataattttgacttcgcttacctgaaaaagcgctgcgaaaaactgggtgtgaagttcattctgggccgtgacggttctgaaccgaaaatccagcgtatgggcgatcgctttgcagtcgacgtgaaaggtcgcattcatttcgatctgtatccggtgattcgtcgcaccatcaacctgccgacctatacgctggaagcggtctacgaagccatttttggccgtccgaaagaaaaggtgtatgccgaagaaatcgcacaagcttgggaaaccaatgaaggcctggaacgtgtcgctcgctatagcatggaagatgcgaaagtgacgtacgaactgggcaaggaatttttcccgatggaagcgcagctgtcacgcctgattggccaaccgctgtgggatgtgtcgcgtagctctaccggtaacctggtggagtggtttctgctgcgtaaagcgtacgaacgtaacgagctggcaccgaataaaccgtccggccgcgaatacgatgaacgtcgcggcggttatgcgggcggttacgttaaagaaccggaaaagggtctgtgggaaaacatcgtctacctggattacaagagtctgtatccgtccattatcattacccataacgttagtccggacacgctgaatcgcgaaggctgcaaagaatacgatgtggcgccgcaggttggtcaccgtttttgtaaagactttccgggcttcattccgtccctgctgggtgatctgctggaagaacgtcagaaaatcaagcgcaaaatgaaggccaccattgatccgatcgaacgtcgcctgctggactatcgtcaacgcgcgatcaaaattctggccaacagctattacggctattacggttatgcgcgtgcccgctggtactgcaaagaatgtgcagaaagcgttacggcttggggccgcgaatacatcgaaatgtctatccgtgaaatcgaagaaaagtacggtttcaaggtgctgtacgctgataccgacggcttccatgcgacgattccgggtgaagatgccgaaaccatcaaaaagaaagcaatggaattcctgaagtacatcaactcaaagctgccgggcgccctggaactggaatatgaaggcttctaccgtcgcggctttttcgttacgaagaaaaagtacgcagtcattgacgaagaaggcaaaatcaccacgcgtggcctggagattgttcgtcgtgactggagcgaaatcgcgaaagagacccaggcgcgtgtgctggaagcgctgctgaaggacggtgatgttgagaaagcggttcgtatcgtgaaggaagttaccgagaagctgagcaaatacgaagtgccgccggagaagctggttattcacgaacaaatcacccgtgacctgaaggattataaagcgaccggtccgcacgtggcggttgcgaaacgtctggcggcgcgtggtgtgaagatccgtccgggcaccgtgattagctacatcgttctgaaaggtagcggccgtattggcgatcgtgcgatcccgttcgacgagtttgatccgaccaagcacaaatatgacgcggaatactatattgagaaccaggtgctgccggcggttgaacgtatcctgcgtgcgttcggttaccgtaaagaggacctgcgttatcagaagacccgtcaagttggtctgagcgcgtggctgaagccgaaaggcacctaa

SEQ ID NO: 10 - DNA, 2324 bp, Artificial Sequence
  Synthetic
atgattctggacgctgactatattacggaaaatggcaagccggttgtgcgcatcttcaaaaaggaaaatggcgaattcaaggtggaatatgatcgcaactttgaaccgtatatttacgccctgctgaaagatgacagtgcaatcgaagaaattaaaaagatcaccgccgaacgccatggcaccgtggttcgtatcacgaaagcagaaaaggttgaacgtaaatttctgggtcgcccggtggaagtttggaaactgtatttcacgcatccgcaggatgtgccggccattcgtgacaaaatccgctctcacccggcagtcgtggatatttatgaatacgacatcccgtttgccaaacgttatctgattgataagggcctggttccgatggaaggtgacgaagaactgaaaatgctggcttttgatatcgaaaccctgtatcacgaaggcgaagaattcgcggaaggtccgattctgatgatctcatacgcagacgaatcggaagctcgcgtgattacctggaaaaaggttgatctgccgtatgttgacgctgtcagcacggaaaaagatatgattaaggcgtttctgcgtgttgtcaaagaaaaggatccggacgttctgatcacctataacggcgataattttgacttcgcttacctgaaaaagcgctgcgaaaaactgggtgtgaagttcattctgggccgtgacggttctgaaccgaaaatccagcgtatgggcgatcgctttgcagtcgacgtgaaaggtcgcattcatttcgatctgtatccggtgattcgtcgcaccatcaacctgccgacctatacgctggaagcggtctacgaagccatttttggccgtccgaaagaaaaggtgtatgccgaagaaatcgcacaagcttgggaaaccaatgaaggcctggaacgtgtcgctcgctatagcatggaagatgcgaaagtgacgtacgaactgggcaaggaatttttcccgatggaagcgcagctgtcacgcctgattggccaaccgctgtgggatgtgtcgcgtagctctaccggtaacctggtggagtggtttctgctgcgtaaagcgtacgaacgtaacgagctggcaccgaataaaccgtccggccgcgaatacgatgaacgtcgcggcggttatgcgggcggttacgttaaagaaccggaaaagggtctgtgggaaaacatcgtctacctggattacaagagtctgtatccgtccattatcattacccataacgttagtccggacacgctgaatcgcgaaggctgcaaagaatacgatgtggcgccgcaggttggtcaccgtttttgtaaagactttccgggcttcattccgtccctgctgggtgatctgctggaagaacgtcagaaaatcaagcgcaaaatgaaggccaccattgatccgatcgaacgtcgcctgctggactatcgtcaacgcgcgatcaaaattctggccaacagctattacggctattacggttatgcgcgtgcccgctggtactgcaaagaatgtgcagaaagcgttacggcttggggccgcgaatacatcgaaatgtctatccgtgaaatcgaagaaaagtacggtttcaaggtgctgtacgctgataccgacggcttccatgcgacgattccgggtgaagatgccgaaaccatcaaaaagaaagcaatggaattcctgaagtacatcaactcaaagctgccgggcgccctggaactggaatatgaaggcttctaccgtcgcggctttttcgttacgaagaaaaagtacgcagtcattgacgaagaaggcaaaatcaccacgcgtggcctggagattgttcgtcgtgactggagcgaaatcgcgaaagaaacccaggcccgcgttctggaagccatcctgaaacatggtaatgtggaagaagcagttcgcattgttaaagaagtgacacagaaactgagcaaatatgaaatcccaccggaaaaactggccatctatgaacagattacacgtccactgcatgaatataaagccattggtccacatgttgcggttgccaaacgcttagccgctaaaggtgttaaaatcaaaccaggcatggttatcggctatattgttctgcgcggcgatggtccgatctctaatcgtgccatcttagcggaagaatatgatccacgcaaacataaatatgatgccgaatattatatcgaaaatcaggtgttaccagcagtgctgcgcattctggaaggctttggctatcgcaaagaagatttacgttggcagaaaaccaaacagacgggcctgacaagttggctgaatattaaaaaatcata

SEQ ID NO: 11 - DNA, 2331 bp, Artificial Sequence
  Synthetic
atgattctggacgctgactatattacggaaaatggcaagccggttgtgcgcatcttcaaaaaggaaaatggcgaattcaaggtggaatatgatcgcaactttgaaccgtatatttacgccctgctgaaagatgacagtgcaatcgaagaaattaaaaagatcaccgccgaacgccatggcaccgtggttcgtatcacgaaagcagaaaaggttgaacgtaaatttctgggtcgcccggtggaagtttggaaactgtatttcacgcatccgcaggatgtgccggccattcgtgacaaaatccgctctcacccggcagtcgtggatatttatgaatacgacatcccgtttgccaaacgttatctgattgataagggcctggttccgatggaaggtgacgaagaactgaaaatgctggcttttgatatcgaaaccctgtatcacgaaggcgaagaattcgcggaaggtccgattctgatgatctcatacgcagacgaatcggaagctcgcgtgattacctggaaaaaggttgatctgccgtatgttgacgctgtcagcacggaaaaagatatgattaaggcgtttctgcgtgttgtcaaagaaaaggatccggacgttctgatcacctataacggcgataattttgacttcgcttacctgaaaaagcgctgcgaaaaactgggtgtgaagttcattctgggccgtgacggttctgaaccgaaaatccagcgtatgggcgatcgctttgcagtcgacgtgaaaggtcgcattcatttcgatctgtatccggtgattcgtcgcaccatcaacctgccgacctatacgctggaagcggtctacgaagccatttttggccgtccgaaagaaaaggtgtatgccgaagaaatcgcacaagcttgggaaaccaatgaaggcctggaacgtgtcgctcgctatagcatggaagatgcgaaagtgacgtacgaactgggcaaggaatttttcccgatggaagcgcagctgtcacgcctgattggccaaccgctgtgggatgtgtcgcgtagctctaccggtaacctggtggagtggtttctgctgcgtaaagcgtacgaacgtaacgaggttgcgccgaacaagccgagcgaggaagagtaccagcgtcgtctgcgtgagagctataccggtggcttcgtgaaggaaccggagaaaggcctgtgggaaaacattgtttacctggattttcacgcgctgtatccgagcatcattatcacccacaacgtgagcccggataccctgaacctggagggttgcaagaactacgacatcgcgccgcaggttggccacaagttctgcaaagacattccgggttttatcccgagcctgctgggccacctgctggaagagcgtcagaagattaaaaccaagatgaaagaaacccaagacccgattgagaaaatcctgctggattaccgtcaaaaggcgatcaaactgctggcgaacagcttctacggttactatggctatgcgaaggcgcgttggtactgcaaagaatgcgcggagagcgtgaccgcgtggggtcgtaaatatattgaactggtttggaaggagctggaagagaagttcggttttaaagtgctgtacatcgacaccgatggcctgtatgcgaccattccgggtggcgaaagcgaagagatcaagaaaaaggcgctggagtttctgaagtacatcaacgcgaaactgccgggcgcgctggaactggagtacgaaggtttctataaacgtggcctgtttgtgaccaaaaagaaatatgcggttattgatgaagagggtaaaatcaccacccgtggcctggagattgttcgtcgtgactggagcgaaatcgcgaaagaaacccaggcccgtgttctggaagcactgctgaaagatggtaatgtcgaagaagcagtgagtattgttaaagaagtcacggaaaaactgtccaagtatgaagtcccgccggaaaaactggtgattcatgaacaaatcacccgcgaactgaaagattacaaggcgacgggcccgcacgtggcaattgctaaacgtctggcagcgcgtggcgttaagatccgtccgggtaccgttattagctatatcgtcctgaaaggctctggtcgtattggtgaccgcgccatcccgtttgatgaattcgacccggctaaacaccgctacgatgcggaatattacattgaaaatcaggtcctgccggctgtggaacgtatcctgaaagcgtttggctatcgtaaggaagatctgcgctaccagaaaacccgtcaagtgggcctgggtgcgtggctgaaaccgaagggtaaaaagtaa

SEQ ID NO: 12 - DNA, 2331 bp, Artificial Sequence
  Synthetic
atgattctggacgctgactatattacggaaaatggcaagccggttgtgcgcatcttcaaaaaggaaaatggcgaattcaaggtggaatatgatcgcaactttgaaccgtatatttacgccctgctgaaagatgacagtgcaatcgaagaaattaaaaagatcaccgccgaacgccatggcaccgtggttcgtatcacgaaagcagaaaaggttgaacgtaaatttctgggtcgcccggtggaagtttggaaactgtatttcacgcatccgcaggatgtgccggccattcgtgacaaaatccgctctcacccggcagtcgtggatatttatgaatacgacatcccgtttgccaaacgttatctgattgataagggcctggttccgatggaaggtgacgaagaactgaaaatgctggcttttgatatcgaaaccctgtatcacgaaggcgaagaattcgcggaaggtccgattctgatgatctcatacgcagacgaatcggaagctcgcgtgattacctggaaaaaggttgatctgccgtatgttgacgctgtcagcacggaaaaagatatgattaaggcgtttctgcgtgttgtcaaagaaaaggatccggacgttctgatcacctataacggcgataattttgacttcgcttacctgaaaaagcgctgcgaaaaactgggtgtgaagttcattctgggccgtgacggttctgaaccgaaaatccagcgtatgggcgatcgctttgcagtcgacgtgaaaggtcgcattcatttcgatctgtatccggtgattcgtcgcaccatcaacctgccgacctatacgctggaagcggtctacgaagccatttttggccgtccgaaagaaaaggtgtatgccgaagaaatcgcacaagcttgggaaaccaatgaaggcctggaacgtgtcgctcgctatagcatggaagatgcgaaagtgacgtacgaactgggcaaggaatttttcccgatggaagcgcagctgtcacgcctgattggccaaccgctgtgggatgtgtcgcgtagctctaccggtaacctggtggagtggtttctgctgcgtaaagcgtacgaacgtaacgagttagcacctaacaaaccggatgaacgcgaatatgaacgccgcctgcgtgaatcttatgcaggcggttttgttaaagaaccggaaaaaggcctgtgggaaaatattgtgtctctggattttcgtgcactgtatccgagcatcatcattacacataatgtgtctccagataccctgaatcgcgaaggttgtcgtaattatgatgttgctccggaagtgggtcataaattttgcaaagattttccaggttttattccgagtctgctgaaacgcttactggatgaacgtcagaaaatcaaaaccaaaatgaaagcctcacaggatcctatcgaaaaaatcatgttagattatcgtcagcgtgccatcaaaattctggccaatagctattatggctattatggctatgctaaagctcgctggtattgcaaagaatgcgccgaatcagtgaccgcttggggtcgcgaatatatcgaatttgtgtggaaagaactggaagaaaaatttggctttaaagttctgtatatcgataccgatggcctgtatgcgaccattccgggtggtaaatctgaagaaattaagaagaaggccttagaatttgtggattatattaatgccaaactgccgggcctgctggaactggaatatgaaggcttttataaacgcggcttcttcgtgaccaagaaaaaatatgcactgatcgatgaagaaggtaaaatcattacacgtggcctggagattgttcgtcgtgactggagcgaaatcgcgaaagaaacccaggcccgtgttctggaagcactgctgaaagatggtaatgtcgaagaagcagtgagtattgttaaagaagtcacggaaaaactgtccaagtatgaagtcccgccggaaaaactggtgattcatgaacaaatcacccgcgaactgaaagattacaaggcgacgggcccgcacgtggcaattgctaaacgtctggcagcgcgtggcgttaagatccgtccgggtaccgttattagctatatcgtcctgaaaggctctggtcgtattggtgaccgcgccatcccgtttgatgaattcgacccggctaaacaccgctacgatgcggaatattacattgaaaatcaggtcctgccggctgtggaacgtatcctgaaagcgtttggctatcgtaaggaagatctgcgctaccagaaaacccgtcaagtgggcctgggtgcgtggctgaaaccgaagggtaaaaagtaa

SEQ ID NO: 13 - DNA, 2328 bp, Artificial Sequence
  Synthetic
atgattctggacgctgactatattacggaaaatggcaagccggttgtgcgcatcttcaaaaaggaaaatggcgaattcaaggtggaatatgatcgcaactttgaaccgtatatttacgccctgctgaaagatgacagtgcaatcgaagaaattaaaaagatcaccgccgaacgccatggcaccgtggttcgtatcacgaaagcagaaaaggttgaacgtaaatttctgggtcgcccggtggaagtttggaaactgtatttcacgcatccgcaggatgtgccggccattcgtgacaaaatccgctctcacccggcagtcgtggatatttatgaatacgacatcccgtttgccaaacgttatctgattgataagggcctggttccgatggaaggtgacgaagaactgaaaatgctggcttttgatatcgaaaccctgtatcacgaaggcgaagaattcgcggaaggtccgattctgatgatctcatacgcagacgaatcggaagctcgcgtgattacctggaaaaaggttgatctgccgtatgttgacgctgtcagcacggaaaaagatatgattaaggcgtttctgcgtgttgtcaaagaaaaggatccggacgttctgatcacctataacggcgataattttgacttcgcttacctgaaaaagcgctgcgaaaaactgggtgtgaagttcattctgggccgtgacggttctgaaccgaaaatccagcgtatgggcgatcgctttgcagtcgacgtgaaaggtcgcattcatttcgatctgtatccggtgattcgtcgcaccatcaacctgccgacctatacgctggaagcggtctacgaagccatttttggccgtccgaaagaaaaggtgtatgccgaagaaatcgcacaagcttgggaaaccaatgaaggcctggaacgtgtcgctcgctatagcatggaagatgcgaaagtgacgtacgaactgggcaaggaatttttcccgatggaagcgcagctgtcacgcctgattggccaaccgctgtgggatgtgtcgcgtagctctaccggtaacctggtggagtggtttctgctgcgtaaagcgtacgaacgtaacgaggttgcgccgaacaagccgagcgaggaagagtaccagcgtcgtctgcgtgagagctataccggtggcttcgtgaaggaaccggagaaaggcctgtgggaaaacattgtttacctggattttcacgcgctgtatccgagcatcattatcacccacaacgtgagcccggataccctgaacctggagggttgcaagaactacgacatcgcgccgcaggttggccacaagttctgcaaagacattccgggttttatcccgagcctgctgggccacctgctggaagagcgtcagaagattaaaaccaagatgaaagaaacccaagacccgattgagaaaatcctgctggattaccgtcaaaaggcgatcaaactgctggcgaacagcttctacggttactatggctatgcgaaggcgcgttggtactgcaaagaatgcgcggagagcgtgaccgcgtggggtcgtaaatatattgaactggtttggaaggagctggaagagaagttcggttttaaagtgctgtacatcgacaccgatggcctgtatgcgaccattccgggtggcgaaagcgaagagatcaagaaaaaggcgctggagtttctgaagtacatcaacgcgaaactgccgggcgcgctggaactggagtacgaaggtttctataaacgtggcctgtttgtgaccaaaaagaaatatgcggttattgatgaagagggtaaaatcaccacccgtggcctggagattgttcgtcgtgactggagcgaaatcgcgaaagagacccaggcgcgtgtgctggaagcgctgctgaaggacggtgatgttgagaaagcggttcgtatcgtgaaggaagttaccgagaagctgagcaaatacgaagtgccgccggagaagctggttattcacgaacaaatcacccgtgacctgaaggattataaagcgaccggtccgcacgtggcggttgcgaaacgtctggcggcgcgtggtgtgaagatccgtccgggcaccgtgattagctacatcgttctgaaaggtagcggccgtattggcgatcgtgcgatcccgttcgacgagtttgatccgaccaagcacaaatatgacgcggaatactatattgagaaccaggtgctgccggcggttgaacgtatcctgcgtgcgttcggttaccgtaaagaggacctgcgttatcagaagacccgtcaagttggtctgagcgcgtggctgaagccgaaaggcacctaa

SEQ ID NO: 14 - DNA, 2328 bp, Artificial Sequence
  Synthetic
atgattctggacgctgactatattacggaaaatggcaagccggttgtgcgcatcttcaaaaaggaaaatggcgaattcaaggtggaatatgatcgcaactttgaaccgtatatttacgccctgctgaaagatgacagtgcaatcgaagaaattaaaaagatcaccgccgaacgccatggcaccgtggttcgtatcacgaaagcagaaaaggttgaacgtaaatttctgggtcgcccggtggaagtttggaaactgtatttcacgcatccgcaggatgtgccggccattcgtgacaaaatccgctctcacccggcagtcgtggatatttatgaatacgacatcccgtttgccaaacgttatctgattgataagggcctggttccgatggaaggtgacgaagaactgaaaatgctggcttttgatatcgaaaccctgtatcacgaaggcgaagaattcgcggaaggtccgattctgatgatctcatacgcagacgaatcggaagctcgcgtgattacctggaaaaaggttgatctgccgtatgttgacgctgtcagcacggaaaaagatatgattaaggcgtttctgcgtgttgtcaaagaaaaggatccggacgttctgatcacctataacggcgataattttgacttcgcttacctgaaaaagcgctgcgaaaaactgggtgtgaagttcattctgggccgtgacggttctgaaccgaaaatccagcgtatgggcgatcgctttgcagtcgacgtgaaaggtcgcattcatttcgatctgtatccggtgattcgtcgcaccatcaacctgccgacctatacgctggaagcggtctacgaagccatttttggccgtccgaaagaaaaggtgtatgccgaagaaatcgcacaagcttgggaaaccaatgaaggcctggaacgtgtcgctcgctatagcatggaagatgcgaaagtgacgtacgaactgggcaaggaatttttcccgatggaagcgcagctgtcacgcctgattggccaaccgctgtgggatgtgtcgcgtagctctaccggtaacctggtggagtggtttctgctgcgtaaagcgtacgaacgtaacgagttagcacctaacaaaccggatgaacgcgaatatgaacgccgcctgcgtgaatcttatgcaggcggttttgttaaagaaccggaaaaaggcctgtgggaaaatattgtgtctctggattttcgtgcactgtatccgagcatcatcattacacataatgtgtctccagataccctgaatcgcgaaggttgtcgtaattatgatgttgctccggaagtgggtcataaattttgcaaagattttccaggttttattccgagtctgctgaaacgcttactggatgaacgtcagaaaatcaaaaccaaaatgaaagcctcacaggatcctatcgaaaaaatcatgttagattatcgtcagcgtgccatcaaaattctggccaatagctattatggctattatggctatgctaaagctcgctggtattgcaaagaatgcgccgaatcagtgaccgcttggggtcgcgaatatatcgaatttgtgtggaaagaactggaagaaaaatttggctttaaagttctgtatatcgataccgatggcctgtatgcgaccattccgggtggtaaatctgaagaaattaagaagaaggccttagaatttgtggattatattaatgccaaactgccgggcctgctggaactggaatatgaaggcttttataaacgcggcttcttcgtgaccaagaaaaaatatgcactgatcgatgaagaaggtaaaatcattacacgtggcctggagattgttcgtcgtgactggagcgaaatcgcgaaagaaacccaggcccgcgttctggaagccatcctgaaacatggtaatgtggaagaagcagttcgcattgttaaagaagtgacacagaaactgagcaaatatgaaatcccaccggaaaaactggccatctatgaacagattacacgtccactgcatgaatataaagccattggtccacatgttgcggttgccaaacgcttagccgctaaaggtgttaaaatcaaaccaggcatggttatcggctatattgttctgcgcggcgatggtccgatctctaatcgtgccatcttagcggaagaatatgatccacgcaaacataaatatgatgccgaatattatatcgaaaatcaggtgttaccagcagtgctgcgcattctggaaggctttggctatcgcaaagaagatttacgttggcagaaaaccaaacagacgggcctgacaagttggctgaatattaaaaaatcataa

SEQ ID NO: 15 - DNA, 2328 bp, Artificial Sequence
  Synthetic
atgattctggacgctgactatattacggaaaatggcaagccggttgtgcgcatcttcaaaaaggaaaatggcgaattcaaggtggaatatgatcgcaactttgaaccgtatatttacgccctgctgaaagatgacagtgcaatcgaagaaattaaaaagatcaccgccgaacgccatggcaccgtggttcgtatcacgaaagcagaaaaggttgaacgtaaatttctgggtcgcccggtggaagtttggaaactgtatttcacgcatccgcaggatgtgccggccattcgtgacaaaatccgctctcacccggcagtcgtggatatttatgaatacgacatcccgtttgccaaacgttatctgattgataagggcctggttccgatggaaggtgacgaagaactgaaaatgctggcttttgatatcgaaaccctgtatcacgaaggcgaagaattcgcggaaggtccgattctgatgatctcatacgcagacgaatcggaagctcgcgtgattacctggaaaaaggttgatctgccgtatgttgacgctgtcagcacggaaaaagatatgattaaggcgtttctgcgtgttgtcaaagaaaaggatccggacgttctgatcacctataacggcgataattttgacttcgcttacctgaaaaagcgctgcgaaaaactgggtgtgaagttcattctgggccgtgacggttctgaaccgaaaatccagcgtatgggcgatcgctttgcagtcgacgtgaaaggtcgcattcatttcgatctgtatccggtgattcgtcgcaccatcaacctgccgacctatacgctggaagcggtctacgaagccatttttggccgtccgaaagaaaaggtgtatgccgaagaaatcgcacaagcttgggaaaccaatgaaggcctggaacgtgtcgctcgctatagcatggaagatgcgaaagtgacgtacgaactgggcaaggaatttttcccgatggaagcgcagctgtcacgcctgattggccaaccgctgtgggatgtgtcgcgtagctctaccggtaacctggtggagtggtttctgctgcgtaaagcgtacgaacgtaacgaggttgcgccgaacaagccgagcgaggaagagtaccagcgtcgtctgcgtgagagctataccggtggcttcgtgaaggaaccggagaaaggcctgtgggaaaacattgtttacctggattttcacgcgctgtatccgagcatcattatcacccacaacgtgagcccggataccctgaacctggagggttgcaagaactacgacatcgcgccgcaggttggccacaagttctgcaaagacattccgggttttatcccgagcctgctgggccacctgctggaagagcgtcagaagattaaaaccaagatgaaagaaacccaagacccgattgagaaaatcctgctggattaccgtcaaaaggcgatcaaactgctggcgaacagcttctacggttactatggctatgcgaaggcgcgttggtactgcaaagaatgcgcggagagcgtgaccgcgtggggtcgtaaatatattgaactggtttggaaggagctggaagagaagttcggttttaaagtgctgtacatcgacaccgatggcctgtatgcgaccattccgggtggcgaaagcgaagagatcaagaaaaaggcgctggagtttctgaagtacatcaacgcgaaactgccgggcgcgctggaactggagtacgaaggtttctataaacgtggcctgtttgtgaccaaaaagaaatatgcggttattgatgaagagggtaaaatcaccacccgtggcctggagattgttcgtcgtgactggagcgaaatcgcgaaagaaacccaggcccgcgttctggaagccatcctgaaacatggtaatgtggaagaagcagttcgcattgttaaagaagtgacacagaaactgagcaaatatgaaatcccaccggaaaaactggccatctatgaacagattacacgtccactgcatgaatataaagccattggtccacatgttgcggttgccaaacgcttagccgctaaaggtgttaaaatcaaaccaggcatggttatcggctatattgttctgcgcggcgatggtccgatctctaatcgtgccatcttagcggaagaatatgatccacgcaaacataaatatgatgccgaatattatatcgaaaatcaggtgttaccagcagtgctgcgcattctggaaggctttggctatcgcaaagaagatttacgttggcagaaaaccaaacagacgggcctgacaagttggctgaatattaaaaaatcataa

SEQ ID NO: 16 - DNA, 2328 bp, Artificial Sequence
  Synthetic
atgattctggacgctgactatattacggaaaatggcaagccggttgtgcgcatcttcaaaaaggaaaatggcgaattcaaggtggaatatgatcgcaactttgaaccgtatatttacgccctgctgaaagatgacagtgcaatcgaagaaattaaaaagatcaccgccgaacgccatggcaccgtggttcgtatcacgaaagcagaaaaggttgaacgtaaatttctgggtcgcccggtggaagtttggaaactgtatttcacgcatccgcaggatgtgccggccattcgtgacaaaatccgctctcacccggcagtcgtggatatttatgaatacgacatcccgtttgccaaacgttatctgattgataagggcctggttccgatggaaggtgacgaagaactgaaaatgctggcttttgatatcgaaaccctgtatcacgaaggcgaagaattcgcggaaggtccgattctgatgatctcatacgcagacgaatcggaagctcgcgtgattacctggaaaaaggttgatctgccgtatgttgacgctgtcagcacggaaaaagatatgattaaggcgtttctgcgtgttgtcaaagaaaaggatccggacgttctgatcacctataacggcgataattttgacttcgcttacctgaaaaagcgctgcgaaaaactgggtgtgaagttcattctgggccgtgacggttctgaaccgaaaatccagcgtatgggcgatcgctttgcagtcgacgtgaaaggtcgcattcatttcgatctgtatccggtgattcgtcgcaccatcaacctgccgacctatacgctggaagcggtctacgaagccatttttggccgtccgaaagaaaaggtgtatgccgaagaaatcgcacaagcttgggaaaccaatgaaggcctggaacgtgtcgctcgctatagcatggaagatgcgaaagtgacgtacgaactgggcaaggaatttttcccgatggaagcgcagctgtcacgcctgattggccaaccgctgtgggatgtgtcgcgtagctctaccggtaacctggtggagtggtttctgctgcgtaaagcgtacgaacgtaacgagttagcacctaacaaaccggatgaacgcgaatatgaacgccgcctgcgtgaatcttatgcaggcggttttgttaaagaaccggaaaaaggcctgtgggaaaatattgtgtctctggattttcgtgcactgtatccgagcatcatcattacacataatgtgtctccagataccctgaatcgcgaaggttgtcgtaattatgatgttgctccggaagtgggtcataaattttgcaaagattttccaggttttattccgagtctgctgaaacgcttactggatgaacgtcagaaaatcaaaaccaaaatgaaagcctcacaggatcctatcgaaaaaatcatgttagattatcgtcagcgtgccatcaaaattctggccaatagctattatggctattatggctatgctaaagctcgctggtattgcaaagaatgcgccgaatcagtgaccgcttggggtcgcgaatatatcgaatttgtgtggaaagaactggaagaaaaatttggctttaaagttctgtatatcgataccgatggcctgtatgcgaccattccgggtggtaaatctgaagaaattaagaagaaggccttagaatttgtggattatattaatgccaaactgccgggcctgctggaactggaatatgaaggcttttataaacgcggcttcttcgtgaccaagaaaaaatatgcactgatcgatgaagaaggtaaaatcattacacgtggcctggagattgttcgtcgtgactggagcgaaatcgcgaaagagacccaggcgcgtgtgctggaagcgctgctgaaggacggtgatgttgagaaagcggttcgtatcgtgaaggaagttaccgagaagctgagcaaatacgaagtgccgccggagaagctggttattcacgaacaaatcacccgtgacctgaaggattataaagcgaccggtccgcacgtggcggttgcgaaacgtctggcggcgcgtggtgtgaagatccgtccgggcaccgtgattagctacatcgttctgaaaggtagcggccgtattggcgatcgtgcgatcccgttcgacgagtttgatccgaccaagcacaaatatgacgcggaatactatattgagaaccaggtgctgccggcggttgaacgtatcctgcgtgcgttcggttaccgtaaagaggacctgcgttatcagaagacccgtcaagttggtctgagcgcgtggctgaagccgaaaggcacctaa

SEQ ID NO: 17 - DNA, 2340 bp, Artificial Sequence
  Synthetic
atggcgagcgcgattctggacaccgattacatcaccgaggatggtaaaccggtgattcgtatcttcaagaaagagaacggcgaatttaagatcgaatatgaccgtaccttcgagccgtacttttatgcgctgctgaaggacgatagcgcgattgaggaagttaagaaaatcaccgcggaacgtcacggtaccgtggttaccgtgaagcgtgttgagaaagtgcagaagaaattcctgggccgtccggtggaagtttggaaactgtactttacccacccgcaagacgtgccggcgattcgtgataagatccgtgaacacccggcggttattgacatctacgagtatgatattccgttcgcgaagcgttacctgatcgacaaaggtctggtgccgatggagggcgatgaggaactgaagatgctggcgttcgacattgaaaccctgtaccacgagggcgaggaatttgcggaaggcccgattctgatgatcagctatgcggatgaggaaggtgcgcgtgtgatcacctggaaaaacgtggacctgccgtacgttgatgtggttagcaccgaacgtgagatgattaagcgtttcctgcgtgtggttaaggagaaagacccggatgttctgatcacctacaacggtgacaacttcgattttgcgtatctgaagaaacgttgcgaaaaactgggcattaactttgcgctgggtcgtgatggcagcgagccgaaaatccagcgtatgggtgaccgtttcgcggtggaagttaagggccgtattcactttgacctgtacccggtgattcgtcgtaccatcaacctgccgacctacaccctggaagcggtgtatgaggcggttttcggtcaaccgaaggaaaaagtttatgcggaggaaatcaccaccgcgtgggagaccggcgaaaacctggagcgtgtggcgcgttacagcatggaggatgcgaaagttacctatgaactgggcaaggagttcctgccgatggaagcgcagctgagccgtctggtgggtcaaccgctgtgggacgttagccgtagcagcaccggcaacctggtggagtggtttctgctgcgtaaagcgtacgaacgtaacgaggttgcgccgaacaagccgagcgaggaagagtaccagcgtcgtctgcgtgagagctataccggtggcttcgtgaaggaaccggagaaaggcctgtgggaaaacattgtttacctggattttcacgcgctgtatccgagcatcattatcacccacaacgtgagcccggataccctgaacctggagggttgcaagaactacgacatcgcgccgcaggttggccacaagttctgcaaagacattccgggttttatcccgagcctgctgggccacctgctggaagagcgtcagaagattaaaaccaagatgaaagaaacccaagacccgattgagaaaatcctgctggattaccgtcaaaaggcgatcaaactgctggcgaacagcttctacggttactatggctatgcgaaggcgcgttggtactgcaaagaatgcgcggagagcgtgaccgcgtggggtcgtaaatatattgaactggtttggaaggagctggaagagaagttcggttttaaagtgctgtacatcgacaccgatggcctgtatgcgaccattccgggtggcgaaagcgaagagatcaagaaaaaggcgctggagtttctgaagtacatcaacgcgaaactgccgggcgcgctggaactggagtacgaaggtttctataaacgtggcctgtttgtgaccaaaaagaaatatgcggttattgatgaagagggtaaaatcaccacccgtggcctggagattgttcgtcgtgactggagcgaaatcgcgaaagaaacccaggcccgtgttctggaagcactgctgaaagatggtaatgtcgaagaagcagtgagtattgttaaagaagtcacggaaaaactgtccaagtatgaagtcccgccggaaaaactggtgattcatgaacaaatcacccgcgaactgaaagattacaaggcgacgggcccgcacgtggcaattgctaaacgtctggcagcgcgtggcgttaagatccgtccgggtaccgttattagctatatcgtcctgaaaggctctggtcgtattggtgaccgcgccatcccgtttgatgaattcgacccggctaaacaccgctacgatgcggaatattacattgaaaatcaggtcctgccggctgtggaacgtatcctgaaagcgtttggctatcgtaaggaagatctgcgctaccagaaaacccgtcaagtgggcctgggtgcgtggctgaaaccgaagggtaaaaagtaa

SEQ ID NO: 18 - DNA, 2337 bp, Artificial Sequence
  Synthetic
atggcgagcgcgattctggacaccgattacatcaccgaggatggtaaaccggtgattcgtatcttcaagaaagagaacggcgaatttaagatcgaatatgaccgtaccttcgagccgtacttttatgcgctgctgaaggacgatagcgcgattgaggaagttaagaaaatcaccgcggaacgtcacggtaccgtggttaccgtgaagcgtgttgagaaagtgcagaagaaattcctgggccgtccggtggaagtttggaaactgtactttacccacccgcaagacgtgccggcgattcgtgataagatccgtgaacacccggcggttattgacatctacgagtatgatattccgttcgcgaagcgttacctgatcgacaaaggtctggtgccgatggagggcgatgaggaactgaagatgctggcgttcgacattgaaaccctgtaccacgagggcgaggaatttgcggaaggcccgattctgatgatcagctatgcggatgaggaaggtgcgcgtgtgatcacctggaaaaacgtggacctgccgtacgttgatgtggttagcaccgaacgtgagatgattaagcgtttcctgcgtgtggttaaggagaaagacccggatgttctgatcacctacaacggtgacaacttcgattttgcgtatctgaagaaacgttgcgaaaaactgggcattaactttgcgctgggtcgtgatggcagcgagccgaaaatccagcgtatgggtgaccgtttcgcggtggaagttaagggccgtattcactttgacctgtacccggtgattcgtcgtaccatcaacctgccgacctacaccctggaagcggtgtatgaggcggttttcggtcaaccgaaggaaaaagtttatgcggaggaaatcaccaccgcgtgggagaccggcgaaaacctggagcgtgtggcgcgttacagcatggaggatgcgaaagttacctatgaactgggcaaggagttcctgccgatggaagcgcagctgagccgtctggtgggtcaaccgctgtgggacgttagccgtagcagcaccggcaacctggtggagtggtttctgctgcgtaaagcgtacgaacgtaacgaggttgcgccgaacaagccgagcgaggaagagtaccagcgtcgtctgcgtgagagctataccggtggcttcgtgaaggaaccggagaaaggcctgtgggaaaacattgtttacctggattttcacgcgctgtatccgagcatcattatcacccacaacgtgagcccggataccctgaacctggagggttgcaagaactacgacatcgcgccgcaggttggccacaagttctgcaaagacattccgggttttatcccgagcctgctgggccacctgctggaagagcgtcagaagattaaaaccaagatgaaagaaacccaagacccgattgagaaaatcctgctggattaccgtcaaaaggcgatcaaactgctggcgaacagcttctacggttactatggctatgcgaaggcgcgttggtactgcaaagaatgcgcggagagcgtgaccgcgtggggtcgtaaatatattgaactggtttggaaggagctggaagagaagttcggttttaaagtgctgtacatcgacaccgatggcctgtatgcgaccattccgggtggcgaaagcgaagagatcaagaaaaaggcgctggagtttctgaagtacatcaacgcgaaactgccgggcgcgctggaactggagtacgaaggtttctataaacgtggcctgtttgtgaccaaaaagaaatatgcggttattgatgaagagggtaaaatcaccacccgtggcctggagattgttcgtcgtgactggagcgaaatcgcgaaagaaacccaggcccgcgttctggaagccatcctgaaacatggtaatgtggaagaagcagttcgcattgttaaagaagtgacacagaaactgagcaaatatgaaatcccaccggaaaaactggccatctatgaacagattacacgtccactgcatgaatataaagccattggtccacatgttgcggttgccaaacgcttagccgctaaaggtgttaaaatcaaaccaggcatggttatcggctatattgttctgcgcggcgatggtccgatctctaatcgtgccatcttagcggaagaatatgatccacgcaaacataaatatgatgccgaatattatatcgaaaatcaggtgttaccagcagtgctgcgcattctggaaggctttggctatcgcaaagaagatttacgttggcagaaaaccaaacagacgggcctgacaagttggctgaatattaaaaaatcataa

SEQ ID NO: 19 - DNA, 2334 bp, Artificial Sequence
  Synthetic
atggcgagcgcgattctggacaccgattacatcaccgaggatggtaaaccggtgattcgtatcttcaagaaagagaacggcgaatttaagatcgaatatgaccgtaccttcgagccgtacttttatgcgctgctgaaggacgatagcgcgattgaggaagttaagaaaatcaccgcggaacgtcacggtaccgtggttaccgtgaagcgtgttgagaaagtgcagaagaaattcctgggccgtccggtggaagtttggaaactgtactttacccacccgcaagacgtgccggcgattcgtgataagatccgtgaacacccggcggttattgacatctacgagtatgatattccgttcgcgaagcgttacctgatcgacaaaggtctggtgccgatggagggcgatgaggaactgaagatgctggcgttcgacattgaaaccctgtaccacgagggcgaggaatttgcggaaggcccgattctgatgatcagctatgcggatgaggaaggtgcgcgtgtgatcacctggaaaaacgtggacctgccgtacgttgatgtggttagcaccgaacgtgagatgattaagcgtttcctgcgtgtggttaaggagaaagacccggatgttctgatcacctacaacggtgacaacttcgattttgcgtatctgaagaaacgttgcgaaaaactgggcattaactttgcgctgggtcgtgatggcagcgagccgaaaatccagcgtatgggtgaccgtttcgcggtggaagttaagggccgtattcactttgacctgtacccggtgattcgtcgtaccatcaacctgccgacctacaccctggaagcggtgtatgaggcggttttcggtcaaccgaaggaaaaagtttatgcggaggaaatcaccaccgcgtgggagaccggcgaaaacctggagcgtgtggcgcgttacagcatggaggatgcgaaagttacctatgaactgggcaaggagttcctgccgatggaagcgcagctgagccgtctggtgggtcaaccgctgtgggacgttagccgtagcagcaccggcaacctggtggagtggtttctgctgcgtaaagcgtacgaacgtaacgagctggcaccgaataaaccgtccggccgcgaatacgatgaacgtcgcggcggttatgcgggcggttacgttaaagaaccggaaaagggtctgtgggaaaacatcgtctacctggattacaagagtctgtatccgtccattatcattacccataacgttagtccggacacgctgaatcgcgaaggctgcaaagaatacgatgtggcgccgcaggttggtcaccgtttttgtaaagactttccgggcttcattccgtccctgctgggtgatctgctggaagaacgtcagaaaatcaagcgcaaaatgaaggccaccattgatccgatcgaacgtcgcctgctggactatcgtcaacgcgcgatcaaaattctggccaacagctattacggctattacggttatgcgcgtgcccgctggtactgcaaagaatgtgcagaaagcgttacggcttggggccgcgaatacatcgaaatgtctatccgtgaaatcgaagaaaagtacggtttcaaggtgctgtacgctgataccgacggcttccatgcgacgattccgggtgaagatgccgaaaccatcaaaaagaaagcaatggaattcctgaagtacatcaactcaaagctgccgggcgccctggaactggaatatgaaggcttctaccgtcgcggctttttcgttacgaagaaaaagtacgcagtcattgacgaagaaggcaaaatcaccacgcgtggcctggagattgttcgtcgtgactggagcgaaatcgcgaaagagacccaggcgcgtgtgctggaagcgctgctgaaggacggtgatgttgagaaagcggttcgtatcgtgaaggaagttaccgagaagctgagcaaatacgaagtgccgccggagaagctggttattcacgaacaaatcacccgtgacctgaaggattataaagcgaccggtccgcacgtggcggttgcgaaacgtctggcggcgcgtggtgtgaagatccgtccgggcaccgtgattagctacatcgttctgaaaggtagcggccgtattggcgatcgtgcgatcccgttcgacgagtttgatccgaccaagcacaaatatgacgcggaatactatattgagaaccaggtgctgccggcggttgaacgtatcctgcgtgcgttcggttaccgtaaagaggacctgcgttatcagaagacccgtcaagttggtctgagcgcgtggctgaagccgaaaggcacctaa

SEQ ID NO: 20 - DNA, 2337 bp, Artificial Sequence
  Synthetic
atggcgagcgcgattctggacaccgattacatcaccgaggatggtaaaccggtgattcgtatcttcaagaaagagaacggcgaatttaagatcgaatatgaccgtaccttcgagccgtacttttatgcgctgctgaaggacgatagcgcgattgaggaagttaagaaaatcaccgcggaacgtcacggtaccgtggttaccgtgaagcgtgttgagaaagtgcagaagaaattcctgggccgtccggtggaagtttggaaactgtactttacccacccgcaagacgtgccggcgattcgtgataagatccgtgaacacccggcggttattgacatctacgagtatgatattccgttcgcgaagcgttacctgatcgacaaaggtctggtgccgatggagggcgatgaggaactgaagatgctggcgttcgacattgaaaccctgtaccacgagggcgaggaatttgcggaaggcccgattctgatgatcagctatgcggatgaggaaggtgcgcgtgtgatcacctggaaaaacgtggacctgccgtacgttgatgtggttagcaccgaacgtgagatgattaagcgtttcctgcgtgtggttaaggagaaagacccggatgttctgatcacctacaacggtgacaacttcgattttgcgtatctgaagaaacgttgcgaaaaactgggcattaactttgcgctgggtcgtgatggcagcgagccgaaaatccagcgtatgggtgaccgtttcgcggtggaagttaagggccgtattcactttgacctgtacccggtgattcgtcgtaccatcaacctgccgacctacaccctggaagcggtgtatgaggcggttttcggtcaaccgaaggaaaaagtttatgcggaggaaatcaccaccgcgtgggagaccggcgaaaacctggagcgtgtggcgcgttacagcatggaggatgcgaaagttacctatgaactgggcaaggagttcctgccgatggaagcgcagctgagccgtctggtgggtcaaccgctgtgggacgttagccgtagcagcaccggcaacctggtggagtggtttctgctgcgtaaagcgtacgaacgtaacgagttagcacctaacaaaccggatgaacgcgaatatgaacgccgcctgcgtgaatcttatgcaggcggttttgttaaagaaccggaaaaaggcctgtgggaaaatattgtgtctctggattttcgtgcactgtatccgagcatcatcattacacataatgtgtctccagataccctgaatcgcgaaggttgtcgtaattatgatgttgctccggaagtgggtcataaattttgcaaagattttccaggttttattccgagtctgctgaaacgcttactggatgaacgtcagaaaatcaaaaccaaaatgaaagcctcacaggatcctatcgaaaaaatcatgttagattatcgtcagcgtgccatcaaaattctggccaatagctattatggctattatggctatgctaaagctcgctggtattgcaaagaatgcgccgaatcagtgaccgcttggggtcgcgaatatatcgaatttgtgtggaaagaactggaagaaaaatttggctttaaagttctgtatatcgataccgatggcctgtatgcgaccattccgggtggtaaatctgaagaaattaagaagaaggccttagaatttgtggattatattaatgccaaactgccgggcctgctggaactggaatatgaaggcttttataaacgcggcttcttcgtgaccaagaaaaaatatgcactgatcgatgaagaaggtaaaatcattacacgtggcctggagattgttcgtcgtgactggagcgaaatcgcgaaagagacccaggcgcgtgtgctggaagcgctgctgaaggacggtgatgttgagaaagcggttcgtatcgtgaaggaagttaccgagaagctgagcaaatacgaagtgccgccggagaagctggttattcacgaacaaatcacccgtgacctgaaggattataaagcgaccggtccgcacgtggcggttgcgaaacgtctggcggcgcgtggtgtgaagatccgtccgggcaccgtgattagctacatcgttctgaaaggtagcggccgtattggcgatcgtgcgatcccgttcgacgagtttgatccgaccaagcacaaatatgacgcggaatactatattgagaaccaggtgctgccggcggttgaacgtatcctgcgtgcgttcggttaccgtaaagaggacctgcgttatcagaagacccgtcaagttggtctgagcgcgtggctgaagccgaaaggcacctaa

SEQ ID NO: 21 - DNA, 2337 bp, Artificial Sequence
  Synthetic
atggcgagcgcgattctggacaccgattacatcaccgaggatggtaaaccggtgattcgtatcttcaagaaagagaacggcgaatttaagatcgaatatgaccgtaccttcgagccgtacttttatgcgctgctgaaggacgatagcgcgattgaggaagttaagaaaatcaccgcggaacgtcacggtaccgtggttaccgtgaagcgtgttgagaaagtgcagaagaaattcctgggccgtccggtggaagtttggaaactgtactttacccacccgcaagacgtgccggcgattcgtgataagatccgtgaacacccggcggttattgacatctacgagtatgatattccgttcgcgaagcgttacctgatcgacaaaggtctggtgccgatggagggcgatgaggaactgaagatgctggcgttcgacattgaaaccctgtaccacgagggcgaggaatttgcggaaggcccgattctgatgatcagctatgcggatgaggaaggtgcgcgtgtgatcacctggaaaaacgtggacctgccgtacgttgatgtggttagcaccgaacgtgagatgattaagcgtttcctgcgtgtggttaaggagaaagacccggatgttctgatcacctacaacggtgacaacttcgattttgcgtatctgaagaaacgttgcgaaaaactgggcattaactttgcgctgggtcgtgatggcagcgagccgaaaatccagcgtatgggtgaccgtttcgcggtggaagttaagggccgtattcactttgacctgtacccggtgattcgtcgtaccatcaacctgccgacctacaccctggaagcggtgtatgaggcggttttcggtcaaccgaaggaaaaagtttatgcggaggaaatcaccaccgcgtgggagaccggcgaaaacctggagcgtgtggcgcgttacagcatggaggatgcgaaagttacctatgaactgggcaaggagttcctgccgatggaagcgcagctgagccgtctggtgggtcaaccgctgtgggacgttagccgtagcagcaccggcaacctggtggagtggtttctgctgcgtaaagcgtacgaacgtaacgagctggcaccgaataaaccgtccggccgcgaatacgatgaacgtcgcggcggttatgcgggcggttacgttaaagaaccggaaaagggtctgtgggaaaacatcgtctacctggattacaagagtctgtatccgtccattatcattacccataacgttagtccggacacgctgaatcgcgaaggctgcaaagaatacgatgtggcgccgcaggttggtcaccgtttttgtaaagactttccgggcttcattccgtccctgctgggtgatctgctggaagaacgtcagaaaatcaagcgcaaaatgaaggccaccattgatccgatcgaacgtcgcctgctggactatcgtcaacgcgcgatcaaaattctggccaacagctattacggctattacggttatgcgcgtgcccgctggtactgcaaagaatgtgcagaaagcgttacggcttggggccgcgaatacatcgaaatgtctatccgtgaaatcgaagaaaagtacggtttcaaggtgctgtacgctgataccgacggcttccatgcgacgattccgggtgaagatgccgaaaccatcaaaaagaaagcaatggaattcctgaagtacatcaactcaaagctgccgggcgccctggaactggaatatgaaggcttctaccgtcgcggctttttcgttacgaagaaaaagtacgcagtcattgacgaagaaggcaaaatcaccacgcgtggcctggagattgttcgtcgtgactggagcgaaatcgcgaaagaaacccaggcccgtgttctggaagcactgctgaaagatggtaatgtcgaagaagcagtgagtattgttaaagaagtcacggaaaaactgtccaagtatgaagtcccgccggaaaaactggtgattcatgaacaaatcacccgcgaactgaaagattacaaggcgacgggcccgcacgtggcaattgctaaacgtctggcagcgcgtggcgttaagatccgtccgggtaccgttattagctatatcgtcctgaaaggctctggtcgtattggtgaccgcgccatcccgtttgatgaattcgacccggctaaacaccgctacgatgcggaatattacattgaaaatcaggtcctgccggctgtggaacgtatcctgaaagcgtttggctatcgtaaggaagatctgcgctaccagaaaacccgtcaagtgggcctgggtgcgtggctgaaaccgaagggtaaaaagtaa

SEQ ID NO: 22 - DNA, 2337 bp, Artificial Sequence
  Synthetic
atggcgagcgcgattctggacaccgattacatcaccgaggatggtaaaccggtgattcgtatcttcaagaaagagaacggcgaatttaagatcgaatatgaccgtaccttcgagccgtacttttatgcgctgctgaaggacgatagcgcgattgaggaagttaagaaaatcaccgcggaacgtcacggtaccgtggttaccgtgaagcgtgttgagaaagtgcagaagaaattcctgggccgtccggtggaagtttggaaactgtactttacccacccgcaagacgtgccggcgattcgtgataagatccgtgaacacccggcggttattgacatctacgagtatgatattccgttcgcgaagcgttacctgatcgacaaaggtctggtgccgatggagggcgatgaggaactgaagatgctggcgttcgacattgaaaccctgtaccacgagggcgaggaatttgcggaaggcccgattctgatgatcagctatgcggatgaggaaggtgcgcgtgtgatcacctggaaaaacgtggacctgccgtacgttgatgtggttagcaccgaacgtgagatgattaagcgtttcctgcgtgtggttaaggagaaagacccggatgttctgatcacctacaacggtgacaacttcgattttgcgtatctgaagaaacgttgcgaaaaactgggcattaactttgcgctgggtcgtgatggcagcgagccgaaaatccagcgtatgggtgaccgtttcgcggtggaagttaagggccgtattcactttgacctgtacccggtgattcgtcgtaccatcaacctgccgacctacaccctggaagcggtgtatgaggcggttttcggtcaaccgaaggaaaaagtttatgcggaggaaatcaccaccgcgtgggagaccggcgaaaacctggagcgtgtggcgcgttacagcatggaggatgcgaaagttacctatgaactgggcaaggagttcctgccgatggaagcgcagctgagccgtctggtgggtcaaccgctgtgggacgttagccgtagcagcaccggcaacctggtggagtggtttctgctgcgtaaagcgtacgaacgtaacgagttagcacctaacaaaccggatgaacgcgaatatgaacgccgcctgcgtgaatcttatgcaggcggttttgttaaagaaccggaaaaaggcctgtgggaaaatattgtgtctctggattttcgtgcactgtatccgagcatcatcattacacataatgtgtctccagataccctgaatcgcgaaggttgtcgtaattatgatgttgctccggaagtgggtcataaattttgcaaagattttccaggttttattccgagtctgctgaaacgcttactggatgaacgtcagaaaatcaaaaccaaaatgaaagcctcacaggatcctatcgaaaaaatcatgttagattatcgtcagcgtgccatcaaaattctggccaatagctattatggctattatggctatgctaaagctcgctggtattgcaaagaatgcgccgaatcagtgaccgcttggggtcgcgaatatatcgaatttgtgtggaaagaactggaagaaaaatttggctttaaagttctgtatatcgataccgatggcctgtatgcgaccattccgggtggtaaatctgaagaaattaagaagaaggccttagaatttgtggattatattaatgccaaactgccgggcctgctggaactggaatatgaaggcttttataaacgcggcttcttcgtgaccaagaaaaaatatgcactgatcgatgaagaaggtaaaatcattacacgtggcctggagattgttcgtcgtgactggagcgaaatcgcgaaagaaacccaggcccgcgttctggaagccatcctgaaacatggtaatgtggaagaagcagttcgcattgttaaagaagtgacacagaaactgagcaaatatgaaatcccaccggaaaaactggccatctatgaacagattacacgtccactgcatgaatataaagccattggtccacatgttgcggttgccaaacgcttagccgctaaaggtgttaaaatcaaaccaggcatggttatcggctatattgttctgcgcggcgatggtccgatctctaatcgtgccatcttagcggaagaatatgatccacgcaaacataaatatgatgccgaatattatatcgaaaatcaggtgttaccagcagtgctgcgcattctggaaggctttggctatcgcaaagaagatttacgttggcagaaaaccaaacagacgggcctgacaagttggctgaatattaaaaaatcataa

SEQ ID NO: 23 - DNA, 2334 bp, Artificial Sequence
  Synthetic
atggcgagcgcgattctggacaccgattacatcaccgaggatggtaaaccggtgattcgtatcttcaagaaagagaacggcgaatttaagatcgaatatgaccgtaccttcgagccgtacttttatgcgctgctgaaggacgatagcgcgattgaggaagttaagaaaatcaccgcggaacgtcacggtaccgtggttaccgtgaagcgtgttgagaaagtgcagaagaaattcctgggccgtccggtggaagtttggaaactgtactttacccacccgcaagacgtgccggcgattcgtgataagatccgtgaacacccggcggttattgacatctacgagtatgatattccgttcgcgaagcgttacctgatcgacaaaggtctggtgccgatggagggcgatgaggaactgaagatgctggcgttcgacattgaaaccctgtaccacgagggcgaggaatttgcggaaggcccgattctgatgatcagctatgcggatgaggaaggtgcgcgtgtgatcacctggaaaaacgtggacctgccgtacgttgatgtggttagcaccgaacgtgagatgattaagcgtttcctgcgtgtggttaaggagaaagacccggatgttctgatcacctacaacggtgacaacttcgattttgcgtatctgaagaaacgttgcgaaaaactgggcattaactttgcgctgggtcgtgatggcagcgagccgaaaatccagcgtatgggtgaccgtttcgcggtggaagttaagggccgtattcactttgacctgtacccggtgattcgtcgtaccatcaacctgccgacctacaccctggaagcggtgtatgaggcggttttcggtcaaccgaaggaaaaagtttatgcggaggaaatcaccaccgcgtgggagaccggcgaaaacctggagcgtgtggcgcgttacagcatggaggatgcgaaagttacctatgaactgggcaaggagttcctgccgatggaagcgcagctgagccgtctggtgggtcaaccgctgtgggacgttagccgtagcagcaccggcaacctggtggagtggtttctgctgcgtaaagcgtacgaacgtaacgagctggcaccgaataaaccgtccggccgcgaatacgatgaacgtcgcggcggttatgcgggcggttacgttaaagaaccggaaaagggtctgtgggaaaacatcgtctacctggattacaagagtctgtatccgtccattatcattacccataacgttagtccggacacgctgaatcgcgaaggctgcaaagaatacgatgtggcgccgcaggttggtcaccgtttttgtaaagactttccgggcttcattccgtccctgctgggtgatctgctggaagaacgtcagaaaatcaagcgcaaaatgaaggccaccattgatccgatcgaacgtcgcctgctggactatcgtcaacgcgcgatcaaaattctggccaacagctattacggctattacggttatgcgcgtgcccgctggtactgcaaagaatgtgcagaaagcgttacggcttggggccgcgaatacatcgaaatgtctatccgtgaaatcgaagaaaagtacggtttcaaggtgctgtacgctgataccgacggcttccatgcgacgattccgggtgaagatgccgaaaccatcaaaaagaaagcaatggaattcctgaagtacatcaactcaaagctgccgggcgccctggaactggaatatgaaggcttctaccgtcgcggctttttcgttacgaagaaaaagtacgcagtcattgacgaagaaggcaaaatcaccacgcgtggcctggagattgttcgtcgtgactggagcgaaatcgcgaaagaaacccaggcccgcgttctggaagccatcctgaaacatggtaatgtggaagaagcagttcgcattgttaaagaagtgacacagaaactgagcaaatatgaaatcccaccggaaaaactggccatctatgaacagattacacgtccactgcatgaatataaagccattggtccacatgttgcggttgccaaacgcttagccgctaaaggtgttaaaatcaaaccaggcatggttatcggctatattgttctgcgcggcgatggtccgatctctaatcgtgccatcttagcggaagaatatgatccacgcaaacataaatatgatgccgaatattatatcgaaaatcaggtgttaccagcagtgctgcgcattctggaaggctttggctatcgcaaagaagatttacgttggcagaaaaccaaacagacgggcctgacaagttggctgaatattaaaaaatcataa

SEQ ID NO: 24 - DNA, 2340 bp, Artificial Sequence
  Synthetic
atggcgagcgcgattctggacaccgattacatcaccgaggatggtaaaccggtgattcgtatcttcaagaaagagaacggcgaatttaagatcgaatatgaccgtaccttcgagccgtacttttatgcgctgctgaaggacgatagcgcgattgaggaagttaagaaaatcaccgcggaacgtcacggtaccgtggttaccgtgaagcgtgttgagaaagtgcagaagaaattcctgggccgtccggtggaagtttggaaactgtactttacccacccgcaagacgtgccggcgattcgtgataagatccgtgaacacccggcggttattgacatctacgagtatgatattccgttcgcgaagcgttacctgatcgacaaaggtctggtgccgatggagggcgatgaggaactgaagatgctggcgttcgacattgaaaccctgtaccacgagggcgaggaatttgcggaaggcccgattctgatgatcagctatgcggatgaggaaggtgcgcgtgtgatcacctggaaaaacgtggacctgccgtacgttgatgtggttagcaccgaacgtgagatgattaagcgtttcctgcgtgtggttaaggagaaagacccggatgttctgatcacctacaacggtgacaacttcgattttgcgtatctgaagaaacgttgcgaaaaactgggcattaactttgcgctgggtcgtgatggcagcgagccgaaaatccagcgtatgggtgaccgtttcgcggtggaagttaagggccgtattcactttgacctgtacccggtgattcgtcgtaccatcaacctgccgacctacaccctggaagcggtgtatgaggcggttttcggtcaaccgaaggaaaaagtttatgcggaggaaatcaccaccgcgtgggagaccggcgaaaacctggagcgtgtggcgcgttacagcatggaggatgcgaaagttacctatgaactgggcaaggagttcctgccgatggaagcgcagctgagccgtctggtgggtcaaccgctgtgggacgttagccgtagcagcaccggcaacctggtggagtggtttctgctgcgtaaagcgtacgaacgtaacgagttagcacctaacaaaccggatgaacgcgaatatgaacgccgcctgcgtgaatcttatgcaggcggttttgttaaagaaccggaaaaaggcctgtgggaaaatattgtgtctctggattttcgtgcactgtatccgagcatcatcattacacataatgtgtctccagataccctgaatcgcgaaggttgtcgtaattatgatgttgctccggaagtgggtcataaattttgcaaagattttccaggttttattccgagtctgctgaaacgcttactggatgaacgtcagaaaatcaaaaccaaaatgaaagcctcacaggatcctatcgaaaaaatcatgttagattatcgtcagcgtgccatcaaaattctggccaatagctattatggctattatggctatgctaaagctcgctggtattgcaaagaatgcgccgaatcagtgaccgcttggggtcgcgaatatatcgaatttgtgtggaaagaactggaagaaaaatttggctttaaagttctgtatatcgataccgatggcctgtatgcgaccattccgggtggtaaatctgaagaaattaagaagaaggccttagaatttgtggattatattaatgccaaactgccgggcctgctggaactggaatatgaaggcttttataaacgcggcttcttcgtgaccaagaaaaaatatgcactgatcgatgaagaaggtaaaatcattacacgtggcctggagattgttcgtcgtgactggagcgaaatcgcgaaagaaacccaggcccgtgttctggaagcactgctgaaagatggtaatgtcgaagaagcagtgagtattgttaaagaagtcacggaaaaactgtccaagtatgaagtcccgccggaaaaactggtgattcatgaacaaatcacccgcgaactgaaagattacaaggcgacgggcccgcacgtggcaattgctaaacgtctggcagcgcgtggcgttaagatccgtccgggtaccgttattagctatatcgtcctgaaaggctctggtcgtattggtgaccgcgccatcccgtttgatgaattcgacccggctaaacaccgctacgatgcggaatattacattgaaaatcaggtcctgccggctgtggaacgtatcctgaaagcgtttggctatcgtaaggaagatctgcgctaccagaaaacccgtcaagtgggcctgggtgcgtggctgaaaccgaagggtaaaaagtaa

SEQ ID NO: 25 - DNA, 2337 bp, Artificial Sequence
  Synthetic
atggcgagcgcgattctggacaccgattacatcaccgaggatggtaaaccggtgattcgtatcttcaagaaagagaacggcgaatttaagatcgaatatgaccgtaccttcgagccgtacttttatgcgctgctgaaggacgatagcgcgattgaggaagttaagaaaatcaccgcggaacgtcacggtaccgtggttaccgtgaagcgtgttgagaaagtgcagaagaaattcctgggccgtccggtggaagtttggaaactgtactttacccacccgcaagacgtgccggcgattcgtgataagatccgtgaacacccggcggttattgacatctacgagtatgatattccgttcgcgaagcgttacctgatcgacaaaggtctggtgccgatggagggcgatgaggaactgaagatgctggcgttcgacattgaaaccctgtaccacgagggcgaggaatttgcggaaggcccgattctgatgatcagctatgcggatgaggaaggtgcgcgtgtgatcacctggaaaaacgtggacctgccgtacgttgatgtggttagcaccgaacgtgagatgattaagcgtttcctgcgtgtggttaaggagaaagacccggatgttctgatcacctacaacggtgacaacttcgattttgcgtatctgaagaaacgttgcgaaaaactgggcattaactttgcgctgggtcgtgatggcagcgagccgaaaatccagcgtatgggtgaccgtttcgcggtggaagttaagggccgtattcactttgacctgtacccggtgattcgtcgtaccatcaacctgccgacctacaccctggaagcggtgtatgaggcggttttcggtcaaccgaaggaaaaagtttatgcggaggaaatcaccaccgcgtgggagaccggcgaaaacctggagcgtgtggcgcgttacagcatggaggatgcgaaagttacctatgaactgggcaaggagttcctgccgatggaagcgcagctgagccgtctggtgggtcaaccgctgtgggacgttagccgtagcagcaccggcaacctggtggagtggtttctgctgcgtaaagcgtacgaacgtaacgaggttgcgccgaacaagccgagcgaggaagagtaccagcgtcgtctgcgtgagagctataccggtggcttcgtgaaggaaccggagaaaggcctgtgggaaaacattgtttacctggattttcacgcgctgtatccgagcatcattatcacccacaacgtgagcccggataccctgaacctggagggttgcaagaactacgacatcgcgccgcaggttggccacaagttctgcaaagacattccgggttttatcccgagcctgctgggccacctgctggaagagcgtcagaagattaaaaccaagatgaaagaaacccaagacccgattgagaaaatcctgctggattaccgtcaaaaggcgatcaaactgctggcgaacagcttctacggttactatggctatgcgaaggcgcgttggtactgcaaagaatgcgcggagagcgtgaccgcgtggggtcgtaaatatattgaactggtttggaaggagctggaagagaagttcggttttaaagtgctgtacatcgacaccgatggcctgtatgcgaccattccgggtggcgaaagcgaagagatcaagaaaaaggcgctggagtttctgaagtacatcaacgcgaaactgccgggcgcgctggaactggagtacgaaggtttctataaacgtggcctgtttgtgaccaaaaagaaatatgcggttattgatgaagagggtaaaatcaccacccgtggcctggagattgttcgtcgtgactggagcgaaatcgcgaaagagacccaggcgcgtgtgctggaagcgctgctgaaggacggtgatgttgagaaagcggttcgtatcgtgaaggaagttaccgagaagctgagcaaatacgaagtgccgccggagaagctggttattcacgaacaaatcacccgtgacctgaaggattataaagcgaccggtccgcacgtggcggttgcgaaacgtctggcggcgcgtggtgtgaagatccgtccgggcaccgtgattagctacatcgttctgaaaggtagcggccgtattggcgatcgtgcgatcccgttcgacgagtttgatccgaccaagcacaaatatgacgcggaatactatattgagaaccaggtgctgccggcggttgaacgtatcctgcgtgcgttcggttaccgtaaagaggacctgcgttatcagaagacccgtcaagttggtctgagcgcgtggctgaagccgaaaggcacctaa

SEQ ID NO: 26 - DNA, 2328 bp, Artificial Sequence
  Synthetic
atgatcttagatgcagattatatcacggaagaaggcaaaccagtgattcgcctgtttaaaaaagaaaatggcgaatttaaaatcgaacatgatcgcacctttcgcccgtatatctatgccctgctgaaagatgatagtaaaatcgaagaagttaagaaaatcacagcggaacgtcatggtaaaattgttcgcatcgttgatgcggaaaaagttgaaaagaaatttctgggtcgtcctattacagtttggcgtctgtattttgaacatcctcaggatgttccgacgattcgcgaaaaaatccgcgaacatagcgccgttgtggacatatttgaatatgatattccgtttgccaaacgctatctgattgataaaggtttaatccctatggaaggcgatgaagaactgaaactgttagcgtttgacatcgaaaccctgtatcatgaaggtgaagaatttggcaaaggcccgatcatcatgatctcttatgcagatgaagaagaagctaaagtgatcacttggaagaagatcgatttaccgtatgttgaagttgtgtctagtgaacgcgaaatgatcaaacgctttctgaaaatcattcgcgaaaaagatccggatattatcattacctataatggtgatagctttgatttaccttatttagccaaacgtgccgaaaaactgggcatcaaactgacgatcggtcgtgatggtagcgaacctaaaatgcagcgcatcggcgatatgacagcagttgaagttaaaggtcgcatccattttgatctgtatcatgttattcgtcgtacaatcaatttaccgacctataccctggaagcagtgtatgaagccatctttggtaaacctaaagaaaaagtgtatgcggatgaaattgctaaagcttgggaaacgggcgaaggcttagaacgcgttgctaaatatagcatggaagatgccaaagctacctatgaactgggcaaagaatttttccctatggaagctcagctgagtcgtctggtgggtcagcctctgtgggatgtgagtcgtagtagtacgggcaatctggtggagtggtttctgctgcgtaaagcgtacgaacgtaacgagttagcacctaacaaaccggatgaacgcgaatatgaacgccgcctgcgtgaatcttatgcaggcggttttgttaaagaaccggaaaaaggcctgtgggaaaatattgtgtctctggattttcgtgcactgtatccgagcatcatcattacacataatgtgtctccagataccctgaatcgcgaaggttgtcgtaattatgatgttgctccggaagtgggtcataaattttgcaaagattttccaggttttattccgagtctgctgaaacgcttactggatgaacgtcagaaaatcaaaaccaaaatgaaagcctcacaggatcctatcgaaaaaatcatgttagattatcgtcagcgtgccatcaaaattctggccaatagctattatggctattatggctatgctaaagctcgctggtattgcaaagaatgcgccgaatcagtgaccgcttggggtcgcgaatatatcgaatttgtgtggaaagaactggaagaaaaatttggctttaaagttctgtatatcgataccgatggcctgtatgcgaccattccgggtggtaaatctgaagaaattaagaagaaggccttagaatttgtggattatattaatgccaaactgccgggcctgctggaactggaatatgaaggcttttataaacgcggcttcttcgtgaccaagaaaaaatatgcactgatcgatgaagaaggtaaaatcattacacgtggcctggagattgttcgtcgtgactggagcgaaatcgcgaaagaaacccaggcccgcgttctggaagccatcctgaaacatggtaatgtggaagaagcagttcgcattgttaaagaagtgacacagaaactgagcaaatatgaaatcccaccggaaaaactggccatctatgaacagattacacgtccactgcatgaatataaagccattggtccacatgttgcggttgccaaacgcttagccgctaaaggtgttaaaatcaaaccaggcatggttatcggctatattgttctgcgcggcgatggtccgatctctaatcgtgccatcttagcggaagaatatgatccacgcaaacataaatatgatgccgaatattatatcgaaaatcaggtgttaccagcagtgctgcgcattctggaaggctttggctatcgcaaagaagatttacgttggcagaaaaccaaacagacgggcctgacaagttggctgaatattaaaaaatcataa

SEQ ID NO: 27 - DNA, 2328 bp, Artificial Sequence
  Synthetic
atgattctggacgctgactatattacggaaaatggcaagccggttgtgcgcatcttcaaaaaggaaaatggcgaattcaaggtggaatatgatcgcaactttgaaccgtatatttacgccctgctgaaagatgacagtgcaatcgaagaaattaaaaagatcaccgccgaacgccatggcaccgtggttcgtatcacgaaagcagaaaaggttgaacgtaaatttctgggtcgcccggtggaagtttggaaactgtatttcacgcatccgcaggatgtgccggccattcgtgacaaaatccgctctcacccggcagtcgtggatatttatgaatacgacatcccgtttgccaaacgttatctgattgataagggcctggttccgatggaaggtgacgaagaactgaaaatgctggcttttgatatcgaaaccctgtatcacgaaggcgaagaattcgcggaaggtccgattctgatgatctcatacgcagacgaatcggaagctcgcgtgattacctggaaaaaggttgatctgccgtatgttgacgctgtcagcacggaaaaagatatgattaaggcgtttctgcgtgttgtcaaagaaaaggatccggacgttctgatcacctataacggcgataattttgacttcgcttacctgaaaaagcgctgcgaaaaactgggtgtgaagttcattctgggccgtgacggttctgaaccgaaaatccagcgtatgggcgatcgctttgcagtcgacgtgaaaggtcgcattcatttcgatctgtatccggtgattcgtcgcaccatcaacctgccgacctatacgctggaagcggtctacgaagccatttttggccgtccgaaagaaaaggtgtatgccgaagaaatcgcacaagcttgggaaaccaatgaaggcctggaacgtgtcgctcgctatagcatggaagatgcgaaagtgacgtacgaactgggcaaggaatttttcccgatggaagcgcagctgtcacgcctgattggccaaccgctgtgggatgtgtcgcgtagctctaccggtaacctggtggagtggtttctgctgcgtaaagcgtacgaacgtaacgagctggcaccgaataaaccgtccggccgcgaatacgatgaacgtcgcggcggttatgcgggcggttacgttaaagaaccggaaaagggtctgtgggaaaacatcgtctacctggattacaagagtctgtatccgtccattatcattacccataacgttagtccggacacgctgaatcgcgaaggctgcaaagaatacgatgtggcgccgcaggttggtcaccgtttttgtaaagactttccgggcttcattccgtccctgctgggtgatctgctggaagaacgtcagaaaatcaagcgcaaaatgaaggccaccattgatccgatcgaacgtcgcctgctggactatcgtcaacgcgcgatcaaaattctggccaacagctattacggctattacggttatgcgcgtgcccgctggtactgcaaagaatgtgcagaaagcgttacggcttggggccgcgaatacatcgaaatgtctatccgtgaaatcgaagaaaagtacggtttcaaggtgctgtacgctgataccgacggcttccatgcgacgattccgggtgaagatgccgaaaccatcaaaaagaaagcaatggaattcctgaagtacatcaactcaaagctgccgggcgccctggaactggaatatgaaggcttctaccgtcgcggctttttcgttacgaagaaaaagtacgcagtcattgacgaagaaggcaaaatcaccacgcgtggcctggagattgttcgtcgtgactggagcgaaatcgcgaaagaaacccaggcccgtgttctggaagcactgctgaaagatggtaatgtcgaagaagcagtgagtattgttaaagaagtcacggaaaaactgtccaagtatgaagtcccgccggaaaaactggtgattcatgaacaaatcacccgcgaactgaaagattacaaggcgacgggcccgcacgtggcaattgctaaacgtctggcagcgcgtggcgttaagatccgtccgggtaccgttattagctatatcgtcctgaaaggctctggtcgtattggtgaccgcgccatcccgtttgatgaattcgacccggctaaacaccgctacgatgcggaatattacattgaaaatcaggtcctgccggctgtggaacgtatcctgaaagcgtttggctatcgtaaggaagatctgcgctaccagaaaacccgtcaagtgggcctgggtgcgtggctgaaaccgaagggtaaaaagtaa

SEQ ID NO: 28 - DNA, 2328 bp, Artificial Sequence
  Synthetic
atgattctggatacggactatattacggaaaatggcaagccggttattcgtgtgttcaaaaaggaaaatggcgaattcaagatcgaatatgatcgtacctttgaaccgtatttctacgctctgctgaaagatgacagcgcgatcgaagatgtcaaaaaggtgaccgccaaacgccatggcacggtggttcgcgtcaagcgtgcagaaaaagtgcagcgcaagtttctgggtcgtccgattgaagtttggaaactgtatttcacccatccgcaagatgtcccggcaatccgcgacaaaattcgtgcacacccggctgtgatcgatatttatgaatacgacatcccgtttgcgaaacgttatctgatcgataagggcctgattccgatggaaggtgacgaagaactgaccatgctggcctttgatattgaaacgctgtatcacgaaggcgaagaattcggcaccggtccgatcctgatgatttcatacgcagatggttcggaagctcgcgtgatcacctggaaaaagattgatctgccgtatgttgacgtcgtgagcacggaaaaagaaatgatcaagcgctttctgcgtattgtgaaagaaaaggatccggacgttctgattacctataacggcgataattttgacttcgcatacctgaaaaagcgttgcgaaaaactgggtatcaagttcacgctgggccgcgacggttctgaaccgaaaattcagcgcatgggcgatcgttttgcggttgaagtcaaaggtcgtatccatttcgatctgtatccggttatccgtcgcaccattaacctgccgacctatacgctggaagcggtttacgaagccgtctttggcaaaccgaaggaaaaagtgtacgcggaagaaattgcacaggcttgggaatcaggcgaaggtctggaacgcgtggcccgttattcgatggaagatgcaaaagttacctacgaactgggtcgcgaatttttcccgatggaagcccagctgagccgtctgatcggccaaagcctgtgggatgtttctcgcagctctacgggtaacctggtcgaatggtttctgctgcgtaaagcgtatgaacgcaacgaactggcaccgaataaaccgtccggccgcgaatacgatgaacgtcgcggcggttatgcgggcggttacgttaaagaaccggaaaagggtctgtgggaaaacatcgtctacctggattacaagagtctgtatccgtccattatcattacccataacgttagtccggacacgctgaatcgcgaaggctgcaaagaatacgatgtggcgccgcaggttggtcaccgtttttgtaaagactttccgggcttcattccgtccctgctgggtgatctgctggaagaacgtcagaaaatcaagcgcaaaatgaaggccaccattgatccgatcgaacgtcgcctgctggactatcgtcaacgcgcgatcaaaattctggccaacagctattacggctattacggttatgcgcgtgcccgctggtactgcaaagaatgtgcagaaagcgttacggcttggggccgcgaatacatcgaaatgtctatccgtgaaatcgaagaaaagtacggtttcaaggtgctgtacgctgataccgacggcttccatgcgacgattccgggtgaagatgccgaaaccatcaaaaagaaagcaatggaattcctgaagtacatcaactcaaagctgccgggcgccctggaactggaatatgaaggcttctaccgtcgcggctttttcgttacgaagaaaaagtacgcagtcattgacgaagaaggcaaaatcaccacgcgcggtctggaaattgtgcgtcgcgattggagtgaaattgccaaagaaacccaggcacgcgttctggaagcaatcctgcgtcatggtgacgtcgaagaagccgttcgcattgtcaaagatgtgacggaaaagctgtcgaaatatgaagtcccgccggaaaaactggtgatccatgaacaaattacccgtgaactgaaggattacaaagcgacgggcccgcacgttgcaattgctaaacgcctggcagcccgtggcatcaagattcgtccgggtaccgttatcagctatattgtcctgaaaggctctggtcgcatcggtgatcgtgctattccgtttgatgaattcgacccgacgaaacaccgttacgatgccgaatattacatcgaaaatcaggtgctgccggccgttgaacgcattctgaaagcatttggctataagaaagaagaactgcgctaccagaaaacccgtcaagtgggcctgggtgcgtggctgaagctgaaaggtaagaaataa

SEQ ID NO: 29 - DNA, 2322 bp, Artificial Sequence
  Synthetic
atgattctggatacggactatattacggaaaatggcaagccggttattcgtgtgttcaaaaaggaaaatggcgaattcaagatcgaatatgatcgtacctttgaaccgtatttctacgctctgctgaaagatgacagcgcgatcgaagatgtcaaaaaggtgaccgccaaacgccatggcacggtggttcgcgtcaagcgtgcagaaaaagtgcagcgcaagtttctgggtcgtccgattgaagtttggaaactgtatttcacccatccgcaagatgtcccggcaatccgcgacaaaattcgtgcacacccggctgtgatcgatatttatgaatacgacatcccgtttgcgaaacgttatctgatcgataagggcctgattccgatggaaggtgacgaagaactgaccatgctggcctttgatattgaaacgctgtatcacgaaggcgaagaattcggcaccggtccgatcctgatgatttcatacgcagatggttcggaagctcgcgtgatcacctggaaaaagattgatctgccgtatgttgacgtcgtgagcacggaaaaagaaatgatcaagcgctttctgcgtattgtgaaagaaaaggatccggacgttctgattacctataacggcgataattttgacttcgcatacctgaaaaagcgttgcgaaaaactgggtatcaagttcacgctgggccgcgacggttctgaaccgaaaattcagcgcatgggcgatcgttttgcggttgaagtcaaaggtcgtatccatttcgatctgtatccggttatccgtcgcaccattaacctgccgacctatacgctggaagcggtttacgaagccgtctttggcaaaccgaaggaaaaagtgtacgcggaagaaattgcacaggcttgggaatcaggcgaaggtctggaacgcgtggcccgttattcgatggaagatgcaaaagttacctacgaactgggtcgcgaatttttcccgatggaagcccagctgagccgtctgatcggccaaagcctgtgggatgtttctcgcagctctacgggtaacctggtcgaatggtttctgctgcgtaaagcgtatgaacgcaacgaactggcaccgaataaaccgtccggccgcgaatacgatgaacgtcgcggcggttatgcgggcggttacgttaaagaaccggaaaagggtctgtgggaaaacatcgtctacctggattacaagagtctgtatccgtccattatcattacccataacgttagtccggacacgctgaatcgcgaaggctgcaaagaatacgatgtggcgccgcaggttggtcaccgtttttgtaaagactttccgggcttcattccgtccctgctgggtgatctgctggaagaacgtcagaaaatcaagcgcaaaatgaaggccaccattgatccgatcgaacgtcgcctgctggactatcgtcaacgcgcgatcaaaattctggccaacagctattacggctattacggttatgcgcgtgcccgctggtactgcaaagaatgtgcagaaagcgttacggcttggggccgcgaatacatcgaaatgtctatccgtgaaatcgaagaaaagtacggtttcaaggtgctgtacgctgataccgacggcttccatgcgacgattccgggtgaagatgccgaaaccatcaaaaagaaagcaatggaattcctgaagtacatcaactcaaagctgccgggcgccctggaactggaatatgaaggcttctaccgtcgcggctttttcgttacgaagaaaaagtacgcagtcattgacgaagaaggcaaaatcaccacgcgcggtctggaaattgtgcgtcgcgattggagtgaaattgccaaagaaacccaggcacgtgtcctggaagcaatcctgaaacatggtgatgtggaagaagcggttcgcattgtcaaagaagtgacggaaaagctgtcgaaatatgaagttccgccggaaaaactggtcatccatgaacaaattacccgcgatctgcgtgactacaaagccacgggtccgcacgtggcagttgcaaaacgtctggcagcccgtggcgtgaagattcgtccgggtaccgtgatcagttatattgttctgaaaggctccggtcgcatcggtgaccgtgctattccgtttgatgaattcgacccgacgaaacaccgttacgatgccgaatattacatcgaaaatcaggtcctgccggccgtggaacgcattctgaaagcatttggttatcgcaaggaagatctgcgttaccagaagaccaaacaagtcggcctgggtgcgtggctgaaagtgaaaaagtaa

SEQ ID NO: 30 - DNA, 2328 bp, Artificial Sequence
  Synthetic
atgattctggatacggactatattacggaaaatggcaagccggttattcgtgtgttcaaaaaggaaaatggcgaattcaagatcgaatatgatcgtacctttgaaccgtatttctacgctctgctgaaagatgacagcgcgatcgaagatgtcaaaaaggtgaccgccaaacgccatggcacggtggttcgcgtcaagcgtgcagaaaaagtgcagcgcaagtttctgggtcgtccgattgaagtttggaaactgtatttcacccatccgcaagatgtcccggcaatccgcgacaaaattcgtgcacacccggctgtgatcgatatttatgaatacgacatcccgtttgcgaaacgttatctgatcgataagggcctgattccgatggaaggtgacgaagaactgaccatgctggcctttgatattgaaacgctgtatcacgaaggcgaagaattcggcaccggtccgatcctgatgatttcatacgcagatggttcggaagctcgcgtgatcacctggaaaaagattgatctgccgtatgttgacgtcgtgagcacggaaaaagaaatgatcaagcgctttctgcgtattgtgaaagaaaaggatccggacgttctgattacctataacggcgataattttgacttcgcatacctgaaaaagcgttgcgaaaaactgggtatcaagttcacgctgggccgcgacggttctgaaccgaaaattcagcgcatgggcgatcgttttgcggttgaagtcaaaggtcgtatccatttcgatctgtatccggttatccgtcgcaccattaacctgccgacctatacgctggaagcggtttacgaagccgtctttggcaaaccgaaggaaaaagtgtacgcggaagaaattgcacaggcttgggaatcaggcgaaggtctggaacgcgtggcccgttattcgatggaagatgcaaaagttacctacgaactgggtcgcgaatttttcccgatggaagcccagctgagccgtctgatcggccaaagcctgtgggatgtttctcgcagctctacgggtaacctggtcgaatggtttctgctgcgtaaagcgtatgaacgcaacgaactggcaccgaataaaccgtccggccgcgaatacgatgaacgtcgcggcggttatgcgggcggttacgttaaagaaccggaaaagggtctgtgggaaaacatcgtctacctggattacaagagtctgtatccgtccattatcattacccataacgttagtccggacacgctgaatcgcgaaggctgcaaagaatacgatgtggcgccgcaggttggtcaccgtttttgtaaagactttccgggcttcattccgtccctgctgggtgatctgctggaagaacgtcagaaaatcaagcgcaaaatgaaggccaccattgatccgatcgaacgtcgcctgctggactatcgtcaacgcgcgatcaaaattctggccaacagctattacggctattacggttatgcgcgtgcccgctggtactgcaaagaatgtgcagaaagcgttacggcttggggccgcgaatacatcgaaatgtctatccgtgaaatcgaagaaaagtacggtttcaaggtgctgtacgctgataccgacggcttccatgcgacgattccgggtgaagatgccgaaaccatcaaaaagaaagcaatggaattcctgaagtacatcaactcaaagctgccgggcgccctggaactggaatatgaaggcttctaccgtcgcggctttttcgttacgaagaaaaagtacgcagtcattgacgaagaaggcaaaatcaccacgcgcggtctggaaattgtgcgtcgcgattggagtgaaattgccaaagaaacccaggcacgtgtgctggaagctctgctgaaagatggcaatgttgaagaagcggtttccattgtcaaagaagtgacggaaaagctgggtaaatatgaagtcccgccggaaaaactggtgatccatgaacaaattacccgcgaactgaaggattacaaagcgacgggcccgcacgttgctatcgcgaaacgtctggcagcgcgtggcgtgaagattcgtccgggtaccgttatcagctatattgtcctgaaaggctctggtcgtatcggtgaccgcgcgattccgtttgatgaattcgacccgacgaaacatcgctacgatgcagaatattacatcgaaaaccaggttctgccggctgtcgaacgtattctgaaagcgtttggctatcgtgccgaagatctgcgctaccagaaaacccgtcaagtgggcctgggtgtttggctgcaaccgaaaggtaagaaataa

SEQ ID NO: 31 - DNA, 2325 bp, Artificial Sequence
  Synthetic
atgattctggatacggactatattacggaaaatggcaagccggttattcgtgtgttcaaaaaggaaaatggcgaattcaagatcgaatatgatcgtacctttgaaccgtatttctacgctctgctgaaagatgacagcgcgatcgaagatgtcaaaaaggtgaccgccaaacgccatggcacggtggttcgcgtcaagcgtgcagaaaaagtgcagcgcaagtttctgggtcgtccgattgaagtttggaaactgtatttcacccatccgcaagatgtcccggcaatccgcgacaaaattcgtgcacacccggctgtgatcgatatttatgaatacgacatcccgtttgcgaaacgttatctgatcgataagggcctgattccgatggaaggtgacgaagaactgaccatgctggcctttgatattgaaacgctgtatcacgaaggcgaagaattcggcaccggtccgatcctgatgatttcatacgcagatggttcggaagctcgcgtgatcacctggaaaaagattgatctgccgtatgttgacgtcgtgagcacggaaaaagaaatgatcaagcgctttctgcgtattgtgaaagaaaaggatccggacgttctgattacctataacggcgataattttgacttcgcatacctgaaaaagcgttgcgaaaaactgggtatcaagttcacgctgggccgcgacggttctgaaccgaaaattcagcgcatgggcgatcgttttgcggttgaagtcaaaggtcgtatccatttcgatctgtatccggttatccgtcgcaccattaacctgccgacctatacgctggaagcggtttacgaagccgtctttggcaaaccgaaggaaaaagtgtacgcggaagaaattgcacaggcttgggaatcaggcgaaggtctggaacgcgtggcccgttattcgatggaagatgcaaaagttacctacgaactgggtcgcgaatttttcccgatggaagcccagctgagccgtctgatcggccaaagcctgtgggatgtttctcgcagctctacgggtaacctggtcgaatggtttctgctgcgtaaagcgtatgaacgcaacgaactggcaccgaataaaccgtccggccgcgaatacgatgaacgtcgcggcggttatgcgggcggttacgttaaagaaccggaaaagggtctgtgggaaaacatcgtctacctggattacaagagtctgtatccgtccattatcattacccataacgttagtccggacacgctgaatcgcgaaggctgcaaagaatacgatgtggcgccgcaggttggtcaccgtttttgtaaagactttccgggcttcattccgtccctgctgggtgatctgctggaagaacgtcagaaaatcaagcgcaaaatgaaggccaccattgatccgatcgaacgtcgcctgctggactatcgtcaacgcgcgatcaaaattctggccaacagctattacggctattacggttatgcgcgtgcccgctggtactgcaaagaatgtgcagaaagcgttacggcttggggccgcgaatacatcgaaatgtctatccgtgaaatcgaagaaaagtacggtttcaaggtgctgtacgctgataccgacggcttccatgcgacgattccgggtgaagatgccgaaaccatcaaaaagaaagcaatggaattcctgaagtacatcaactcaaagctgccgggcgccctggaactggaatatgaaggcttctaccgtcgcggctttttcgttacgaagaaaaagtacgcagtcattgacgaagaaggcaaaatcaccacgcgcggtctggaaattgtgcgtcgcgattggagtgaaattgccaaagaaacccaggcaaaggttctggaagcaattctgaaacatggtaacgtcgaagaagcggtcaagatcgtgaaagaagttaccgaaaaactgtcgaattatgaaattccggtcgaaaagctggtgatctacgaacaaattacgcgcccgctgaacgaatataaagccattggcccgcacgtggcagttgctaaacgtctggcggccaagggtatcaagattaaaccgggcatggtgattggttatgttgtcctgcgcggcgatggtccgatcagcaaacgtgcgatcgccatcgaagaattcgatggcaaaaagcataagtacgacgcagaatactacatcgaaaatcaggttctgccggccgtcgaacgtatcctgaaagcattcggttataagcgtgaagatctgcgctggcagaagaccaaacaagtgggcctgggtgcgtggctgaaagttaaaaagtcttaa

SEQ ID NO: 32 - DNA, 2328 bp, Artificial Sequence
  Synthetic
atgattctggatacggactatattacggaaaatggcaagccggttattcgtgtgttcaaaaaggaaaatggcgaattcaagatcgaatatgatcgtacctttgaaccgtatttctacgctctgctgaaagatgacagcgcgatcgaagatgtcaaaaaggtgaccgccaaacgccatggcacggtggttcgcgtcaagcgtgcagaaaaagtgcagcgcaagtttctgggtcgtccgattgaagtttggaaactgtatttcacccatccgcaagatgtcccggcaatccgcgacaaaattcgtgcacacccggctgtgatcgatatttatgaatacgacatcccgtttgcgaaacgttatctgatcgataagggcctgattccgatggaaggtgacgaagaactgaccatgctggcctttgatattgaaacgctgtatcacgaaggcgaagaattcggcaccggtccgatcctgatgatttcatacgcagatggttcggaagctcgcgtgatcacctggaaaaagattgatctgccgtatgttgacgtcgtgagcacggaaaaagaaatgatcaagcgctttctgcgtattgtgaaagaaaaggatccggacgttctgattacctataacggcgataattttgacttcgcatacctgaaaaagcgttgcgaaaaactgggtatcaagttcacgctgggccgcgacggttctgaaccgaaaattcagcgcatgggcgatcgttttgcggttgaagtcaaaggtcgtatccatttcgatctgtatccggttatccgtcgcaccattaacctgccgacctatacgctggaagcggtttacgaagccgtctttggcaaaccgaaggaaaaagtgtacgcggaagaaattgcacaggcttgggaatcaggcgaaggtctggaacgcgtggcccgttattcgatggaagatgcaaaagttacctacgaactgggtcgcgaatttttcccgatggaagcccagctgagccgtctgatcggccaaagcctgtgggatgtttctcgcagctctacgggtaacctggtcgaatggtttctgctgcgtaaagcgtatgaacgcaacgaactggcaccgaataaaccgtccggccgcgaatacgatgaacgtcgcggcggttatgcgggcggttacgttaaagaaccggaaaagggtctgtgggaaaacatcgtctacctggattacaagagtctgtatccgtccattatcattacccataacgttagtccggacacgctgaatcgcgaaggctgcaaagaatacgatgtggcgccgcaggttggtcaccgtttttgtaaagactttccgggcttcattccgtccctgctgggtgatctgctggaagaacgtcagaaaatcaagcgcaaaatgaaggccaccattgatccgatcgaacgtcgcctgctggactatcgtcaacgcgcgatcaaaattctggccaacagctattacggctattacggttatgcgcgtgcccgctggtactgcaaagaatgtgcagaaagcgttacggcttggggccgcgaatacatcgaaatgtctatccgtgaaatcgaagaaaagtacggtttcaaggtgctgtacgctgataccgacggcttccatgcgacgattccgggtgaagatgccgaaaccatcaaaaagaaagcaatggaattcctgaagtacatcaactcaaagctgccgggcgccctggaactggaatatgaaggcttctaccgtcgcggctttttcgttacgaagaaaaagtacgcagtcattgacgaagaaggcaaaatcaccacgcgcggtctggaaattgtgcgtcgcgattggagtgaaattgccaaagaaacccaggcacgtgttctggaagcactgctgaaagatggtaatgtcgaagaagcagtgagtattgttaaagaagtcacggaaaaactgtccaagtatgaagtcccgccggaaaaactggtgattcatgaacaaatcacccgcgaactgaaagattacaaggcgacgggcccgcacgtggcaattgctaaacgtctggcagcgcgtggcgttaagatccgtccgggtaccgttattagctatatcgtcctgaaaggctctggtcgtattggtgaccgcgccatcccgtttgatgaattcgacccggctaaacaccgctacgatgcggaatattacattgaaaatcaggtcctgccggctgtggaacgtatcctgaaagcgtttggctatcgtaaggaagatctgcgctaccagaaaacccgtcaagtgggcctgggtgcgtggctgaaaccgaagggtaaaaagtaa

SEQ ID NO: 33 - DNA, 2328 bp, Artificial Sequence
  Synthetic
atgattctggatacggactatattacggaaaatggcaagccggttattcgtgtgttcaaaaaggaaaatggcgaattcaagatcgaatatgatcgtacctttgaaccgtatttctacgctctgctgaaagatgacagcgcgatcgaagatgtcaaaaaggtgaccgccaaacgccatggcacggtggttcgcgtcaagcgtgcagaaaaagtgcagcgcaagtttctgggtcgtccgattgaagtttggaaactgtatttcacccatccgcaagatgtcccggcaatccgcgacaaaattcgtgcacacccggctgtgatcgatatttatgaatacgacatcccgtttgcgaaacgttatctgatcgataagggcctgattccgatggaaggtgacgaagaactgaccatgctggcctttgatattgaaacgctgtatcacgaaggcgaagaattcggcaccggtccgatcctgatgatttcatacgcagatggttcggaagctcgcgtgatcacctggaaaaagattgatctgccgtatgttgacgtcgtgagcacggaaaaagaaatgatcaagcgctttctgcgtattgtgaaagaaaaggatccggacgttctgattacctataacggcgataattttgacttcgcatacctgaaaaagcgttgcgaaaaactgggtatcaagttcacgctgggccgcgacggttctgaaccgaaaattcagcgcatgggcgatcgttttgcggttgaagtcaaaggtcgtatccatttcgatctgtatccggttatccgtcgcaccattaacctgccgacctatacgctggaagcggtttacgaagccgtctttggcaaaccgaaggaaaaagtgtacgcggaagaaattgcacaggcttgggaatcaggcgaaggtctggaacgcgtggcccgttattcgatggaagatgcaaaagttacctacgaactgggtcgcgaatttttcccgatggaagcccagctgagccgtctgatcggccaaagcctgtgggatgtttctcgcagctctacgggtaacctggtcgaatggtttctgctgcgtaaagcgtatgaacgcaacgaactggcaccgaataaaccgtccggccgcgaatacgatgaacgtcgcggcggttatgcgggcggttacgttaaagaaccggaaaagggtctgtgggaaaacatcgtctacctggattacaagagtctgtatccgtccattatcattacccataacgttagtccggacacgctgaatcgcgaaggctgcaaagaatacgatgtggcgccgcaggttggtcaccgtttttgtaaagactttccgggcttcattccgtccctgctgggtgatctgctggaagaacgtcagaaaatcaagcgcaaaatgaaggccaccattgatccgatcgaacgtcgcctgctggactatcgtcaacgcgcgatcaaaattctggccaacagctattacggctattacggttatgcgcgtgcccgctggtactgcaaagaatgtgcagaaagcgttacggcttggggccgcgaatacatcgaaatgtctatccgtgaaatcgaagaaaagtacggtttcaaggtgctgtacgctgataccgacggcttccatgcgacgattccgggtgaagatgccgaaaccatcaaaaagaaagcaatggaattcctgaagtacatcaactcaaagctgccgggcgccctggaactggaatatgaaggcttctaccgtcgcggctttttcgttacgaagaaaaagtacgcagtcattgacgaagaaggcaaaatcaccacgcgcggtctggaaattgtgcgtcgcgattggagtgaaattgccaaagaaacccaggcacgcgtcctggaagcaatcctgaaagatggtgacgtggaagaagccgtccgtattgtgaaagaagttacggaaaaactgtccaaatatgaagttccgccggaaaaactggtcatccatgaacaaattacccgcgaactgaaagattacaaagcgacgggcccgcacgtcgcaatcgctaaacgtctggcggcgcgtggcgtgaaaattcgtccgggtaccgtgatctcatatattgttctgaaaggctcgggtcgtatcggtgaccgcgctattccgtttgatgaattcgacccgaaaaaacacaaatacgatgcggaatactacatcgaaaaccaggttctgccggccgtcgaacgtattctgcgcgcatttggctaccgtaaagaagatctgcgttatcaaaaaaccaaacaagtgggtctgggtgcgtggctgaaaccgaaaggtaaaaaataa

SEQ ID NO: 34 - DNA, 2325 bp, Artificial Sequence
  Synthetic
atgattctggatacggactatattacggaaaatggcaagccggttattcgtgtgttcaaaaaggaaaatggcgaattcaagatcgaatatgatcgtacctttgaaccgtatttctacgctctgctgaaagatgacagcgcgatcgaagatgtcaaaaaggtgaccgccaaacgccatggcacggtggttcgcgtcaagcgtgcagaaaaagtgcagcgcaagtttctgggtcgtccgattgaagtttggaaactgtatttcacccatccgcaagatgtcccggcaatccgcgacaaaattcgtgcacacccggctgtgatcgatatttatgaatacgacatcccgtttgcgaaacgttatctgatcgataagggcctgattccgatggaaggtgacgaagaactgaccatgctggcctttgatattgaaacgctgtatcacgaaggcgaagaattcggcaccggtccgatcctgatgatttcatacgcagatggttcggaagctcgcgtgatcacctggaaaaagattgatctgccgtatgttgacgtcgtgagcacggaaaaagaaatgatcaagcgctttctgcgtattgtgaaagaaaaggatccggacgttctgattacctataacggcgataattttgacttcgcatacctgaaaaagcgttgcgaaaaactgggtatcaagttcacgctgggccgcgacggttctgaaccgaaaattcagcgcatgggcgatcgttttgcggttgaagtcaaaggtcgtatccatttcgatctgtatccggttatccgtcgcaccattaacctgccgacctatacgctggaagcggtttacgaagccgtctttggcaaaccgaaggaaaaagtgtacgcggaagaaattgcacaggcttgggaatcaggcgaaggtctggaacgcgtggcccgttattcgatggaagatgcaaaagttacctacgaactgggtcgcgaatttttcccgatggaagcccagctgagccgtctgatcggccaaagcctgtgggatgtttctcgcagctctacgggtaacctggtcgaatggtttctgctgcgtaaagcgtatgaacgcaacgaactggcaccgaataaaccgtccggccgcgaatacgatgaacgtcgcggcggttatgcgggcggttacgttaaagaaccggaaaagggtctgtgggaaaacatcgtctacctggattacaagagtctgtatccgtccattatcattacccataacgttagtccggacacgctgaatcgcgaaggctgcaaagaatacgatgtggcgccgcaggttggtcaccgtttttgtaaagactttccgggcttcattccgtccctgctgggtgatctgctggaagaacgtcagaaaatcaagcgcaaaatgaaggccaccattgatccgatcgaacgtcgcctgctggactatcgtcaacgcgcgatcaaaattctggccaacagctattacggctattacggttatgcgcgtgcccgctggtactgcaaagaatgtgcagaaagcgttacggcttggggccgcgaatacatcgaaatgtctatccgtgaaatcgaagaaaagtacggtttcaaggtgctgtacgctgataccgacggcttccatgcgacgattccgggtgaagatgccgaaaccatcaaaaagaaagcaatggaattcctgaagtacatcaactcaaagctgccgggcgccctggaactggaatatgaaggcttctaccgtcgcggctttttcgttacgaagaaaaagtacgcagtcattgacgaagaaggcaaaatcaccacgcgcggtctggaaattgtgcgtcgcgattggagtgaaattgccaaagaaacccaggcacgtgttctggaagcaattctgaaacatggtaacgtcgaagaagcggtcaaaatcgtgaaagaagttacggaaaaactgtctaactacgaaattccgccggaaaaactggccatctacgaacaaattacccgcccgctgcatgaatataaagcaatcggtccgcacgtcgcagtggcaaaacgtctggcagcacgcggcgttaaagtcaaaccgggtatggtcatcggctatattgtgctgcgtggtgatggcccgatcagcaaccgcgcaattctggctgaagaatacgatctgaaaaaacacaaatacgacgccgaatattacatcgaaaatcaggttctgccggctgtcctgcgtattctggaagcgtttggctatcgtaaagaagatctgcgctggcagaaaacccgtcaaacgggtctgacctcatggctgaatattaaaaaatcgtaa

SEQ ID NO: 35 - DNA, 2325 bp, Artificial Sequence
  Synthetic
atgattctggatacggactatattacggaaaatggcaagccggttattcgtgtgttcaaaaaggaaaatggcgaattcaagatcgaatatgatcgtacctttgaaccgtatttctacgctctgctgaaagatgacagcgcgatcgaagatgtcaaaaaggtgaccgccaaacgccatggcacggtggttcgcgtcaagcgtgcagaaaaagtgcagcgcaagtttctgggtcgtccgattgaagtttggaaactgtatttcacccatccgcaagatgtcccggcaatccgcgacaaaattcgtgcacacccggctgtgatcgatatttatgaatacgacatcccgtttgcgaaacgttatctgatcgataagggcctgattccgatggaaggtgacgaagaactgaccatgctggcctttgatattgaaacgctgtatcacgaaggcgaagaattcggcaccggtccgatcctgatgatttcatacgcagatggttcggaagctcgcgtgatcacctggaaaaagattgatctgccgtatgttgacgtcgtgagcacggaaaaagaaatgatcaagcgctttctgcgtattgtgaaagaaaaggatccggacgttctgattacctataacggcgataattttgacttcgcatacctgaaaaagcgttgcgaaaaactgggtatcaagttcacgctgggccgcgacggttctgaaccgaaaattcagcgcatgggcgatcgttttgcggttgaagtcaaaggtcgtatccatttcgatctgtatccggttatccgtcgcaccattaacctgccgacctatacgctggaagcggtttacgaagccgtctttggcaaaccgaaggaaaaagtgtacgcggaagaaattgcacaggcttgggaatcaggcgaaggtctggaacgcgtggcccgttattcgatggaagatgcaaaagttacctacgaactgggtcgcgaatttttcccgatggaagcccagctgagccgtctgatcggccaaagcctgtgggatgtttctcgcagctctacgggtaacctggtcgaatggtttctgctgcgtaaagcgtatgaacgcaacgaactggcaccgaataaaccgtccggccgcgaatacgatgaacgtcgcggcggttatgcgggcggttacgttaaagaaccggaaaagggtctgtgggaaaacatcgtctacctggattacaagagtctgtatccgtccattatcattacccataacgttagtccggacacgctgaatcgcgaaggctgcaaagaatacgatgtggcgccgcaggttggtcaccgtttttgtaaagactttccgggcttcattccgtccctgctgggtgatctgctggaagaacgtcagaaaatcaagcgcaaaatgaaggccaccattgatccgatcgaacgtcgcctgctggactatcgtcaacgcgcgatcaaaattctggccaacagctattacggctattacggttatgcgcgtgcccgctggtactgcaaagaatgtgcagaaagcgttacggcttggggccgcgaatacatcgaaatgtctatccgtgaaatcgaagaaaagtacggtttcaaggtgctgtacgctgataccgacggcttccatgcgacgattccgggtgaagatgccgaaaccatcaaaaagaaagcaatggaattcctgaagtacatcaactcaaagctgccgggcgccctggaactggaatatgaaggcttctaccgtcgcggctttttcgttacgaagaaaaagtacgcagtcattgacgaagaaggcaaaatcaccacgcgcggtctggaaattgtgcgtcgcgattggagtgaaattgccaaagaaacccaggcaaaagttctggaagcaatcctgaaacatggtaatgtcgaagaagcagtgaaaattgtcaaggaagtgacggaaaaactgtcgaagtatgaaatcccgccggaaaaactggtgatctacgaacaaattacccgcccgctgcatgaatataaagcgattggcccgcacgtggcagttgctaaacgtctggcagcccgcggtgtcaaagtgcgtccgggcatggtgatcggttatattgttctgcgtggcgatggtccgatcagtaaacgcgcgattctggccgaagaatttgatccgcgcaaacacaagtacgacgccgaatattacatcgaaaaccaggtgctgccggctgttctgcgtattctggaagcgttcggctatcgtaaagaagatctgcgctggcagaaaaccaagcaaacgggtctgaccgcatggctgaatgtgaaaaagaaataa

SEQ ID NO: 36 - DNA, 2331 bp, Artificial Sequence
  Synthetic
atgattctggatacggactatattacggaaaatggcaagccggttattcgtgtgttcaaaaaggaaaatggcgaattcaagatcgaatatgatcgtacctttgaaccgtatttctacgctctgctgaaagatgacagcgcgatcgaagatgtcaaaaaggtgaccgccaaacgccatggcacggtggttcgcgtcaagcgtgcagaaaaagtgcagcgcaagtttctgggtcgtccgattgaagtttggaaactgtatttcacccatccgcaagatgtcccggcaatccgcgacaaaattcgtgcacacccggctgtgatcgatatttatgaatacgacatcccgtttgcgaaacgttatctgatcgataagggcctgattccgatggaaggtgacgaagaactgaccatgctggcctttgatattgaaacgctgtatcacgaaggcgaagaattcggcaccggtccgatcctgatgatttcatacgcagatggttcggaagctcgcgtgatcacctggaaaaagattgatctgccgtatgttgacgtcgtgagcacggaaaaagaaatgatcaagcgctttctgcgtattgtgaaagaaaaggatccggacgttctgattacctataacggcgataattttgacttcgcatacctgaaaaagcgttgcgaaaaactgggtatcaagttcacgctgggccgcgacggttctgaaccgaaaattcagcgcatgggcgatcgttttgcggttgaagtcaaaggtcgtatccatttcgatctgtatccggttatccgtcgcaccattaacctgccgacctatacgctggaagcggtttacgaagccgtctttggcaaaccgaaggaaaaagtgtacgcggaagaaattgcacaggcttgggaatcaggcgaaggtctggaacgcgtggcccgttattcgatggaagatgcaaaagttacctacgaactgggtcgcgaatttttcccgatggaagcccagctgagccgtctgatcggccaaagcctgtgggatgtttctcgcagctctacgggtaacctggtcgaatggtttctgctgcgtaaagcgtatgaacgcaacgaactggcgccgaataaaccggatgaacgcgaatatgaacgtcgcctgcgtgaaagttatgaaggcggttacgttaaagaaccggaacgcggcctgtgggaaggtattgtgtcactggattttcgtagtctgtacccgtccattatcattacccataacgtttcgccggatacgctgaataaagaaggctgcggtgaatatgacgaagccccggaagtgggtcaccgcttctgtaaagattttccgggcttcattccgtcactgctgggttcgctgctggaagaacgccagaagatcaagaaacgtatgaaggaatctaaggatccggtggaacgcaaactgctggactatcgtcaacgcgcgatcaagattctggccaacagcttttatggctattacggttacgcgaaagcccgttggtactgcaaggaatgtgcagaaagcgtgaccgcttggggccgccagtatattgaactggtccgtcgcgaactggaagaacgtggttttaaagtgctgtatatcgataccgacggcctgtacgccacgattccgggtgaaaagaactgggaagaaatcaagcgtcgcgcactggaatttgttaactacatcaattccaaactgccgggcattctggaactggaatatgaaggcttctacacccgtggctttttcgtgacgaagaaaaagtatgcgctgatcgatgaagaaggcaaaattgtcacccgtggtctggaaatcgtgcgtcgcgattggagtgaaattgccaaagaaacccaggcacgcgttctggaagcaatcctgcgtcatggtgacgtcgaagaagccgttcgcattgtcaaagatgtgacggaaaagctgtcgaaatatgaagtcccgccggaaaaactggtgatccatgaacaaattacccgtgaactgaaggattacaaagcgacgggcccgcacgttgcaattgctaaacgcctggcagcccgtggcatcaagattcgtccgggtaccgttatcagctatattgtcctgaaaggctctggtcgcatcggtgatcgtgctattccgtttgatgaattcgacccgacgaaacaccgttacgatgccgaatattacatcgaaaatcaggtgctgccggccgttgaacgcattctgaaagcatttggctataagaaagaagaactgcgctaccagaaaacccgtcaagtgggcctgggtgcgtggctgaagctgaaaggtaagaaataa

SEQ ID NO: 37 - DNA, 2325 bp, Artificial Sequence
  Synthetic
atgattctggatacggactatattacggaaaatggcaagccggttattcgtgtgttcaaaaaggaaaatggcgaattcaagatcgaatatgatcgtacctttgaaccgtatttctacgctctgctgaaagatgacagcgcgatcgaagatgtcaaaaaggtgaccgccaaacgccatggcacggtggttcgcgtcaagcgtgcagaaaaagtgcagcgcaagtttctgggtcgtccgattgaagtttggaaactgtatttcacccatccgcaagatgtcccggcaatccgcgacaaaattcgtgcacacccggctgtgatcgatatttatgaatacgacatcccgtttgcgaaacgttatctgatcgataagggcctgattccgatggaaggtgacgaagaactgaccatgctggcctttgatattgaaacgctgtatcacgaaggcgaagaattcggcaccggtccgatcctgatgatttcatacgcagatggttcggaagctcgcgtgatcacctggaaaaagattgatctgccgtatgttgacgtcgtgagcacggaaaaagaaatgatcaagcgctttctgcgtattgtgaaagaaaaggatccggacgttctgattacctataacggcgataattttgacttcgcatacctgaaaaagcgttgcgaaaaactgggtatcaagttcacgctgggccgcgacggttctgaaccgaaaattcagcgcatgggcgatcgttttgcggttgaagtcaaaggtcgtatccatttcgatctgtatccggttatccgtcgcaccattaacctgccgacctatacgctggaagcggtttacgaagccgtctttggcaaaccgaaggaaaaagtgtacgcggaagaaattgcacaggcttgggaatcaggcgaaggtctggaacgcgtggcccgttattcgatggaagatgcaaaagttacctacgaactgggtcgcgaatttttcccgatggaagcccagctgagccgtctgatcggccaaagcctgtgggatgtttctcgcagctctacgggtaacctggtcgaatggtttctgctgcgtaaagcgtatgaacgcaacgaactggcgccgaataaaccggatgaacgcgaatatgaacgtcgcctgcgtgaaagttatgaaggcggttacgttaaagaaccggaacgcggcctgtgggaaggtattgtgtcactggattttcgtagtctgtacccgtccattatcattacccataacgtttcgccggatacgctgaataaagaaggctgcggtgaatatgacgaagccccggaagtgggtcaccgcttctgtaaagattttccgggcttcattccgtcactgctgggttcgctgctggaagaacgccagaagatcaagaaacgtatgaaggaatctaaggatccggtggaacgcaaactgctggactatcgtcaacgcgcgatcaagattctggccaacagcttttatggctattacggttacgcgaaagcccgttggtactgcaaggaatgtgcagaaagcgtgaccgcttggggccgccagtatattgaactggtccgtcgcgaactggaagaacgtggttttaaagtgctgtatatcgataccgacggcctgtacgccacgattccgggtgaaaagaactgggaagaaatcaagcgtcgcgcactggaatttgttaactacatcaattccaaactgccgggcattctggaactggaatatgaaggcttctacacccgtggctttttcgtgacgaagaaaaagtatgcgctgatcgatgaagaaggcaaaattgtcacccgtggtctggaaatcgtgcgtcgcgattggagtgaaattgccaaagaaacccaggcacgtgtcctggaagcaatcctgaaacatggtgatgtggaagaagcggttcgcattgtcaaagaagtgacggaaaagctgtcgaaatatgaagttccgccggaaaaactggtcatccatgaacaaattacccgcgatctgcgtgactacaaagccacgggtccgcacgtggcagttgcaaaacgtctggcagcccgtggcgtgaagattcgtccgggtaccgtgatcagttatattgttctgaaaggctccggtcgcatcggtgaccgtgctattccgtttgatgaattcgacccgacgaaacaccgttacgatgccgaatattacatcgaaaatcaggtcctgccggccgtggaacgcattctgaaagcatttggttatcgcaaggaagatctgcgttaccagaagaccaaacaagtcggcctgggtgcgtggctgaaagtgaaaaagtaa

SEQ ID NO: 38 - DNA, 2331 bp, Artificial Sequence
  Synthetic
atgattctggatacggactatattacggaaaatggcaagccggttattcgtgtgttcaaaaaggaaaatggcgaattcaagatcgaatatgatcgtacctttgaaccgtatttctacgctctgctgaaagatgacagcgcgatcgaagatgtcaaaaaggtgaccgccaaacgccatggcacggtggttcgcgtcaagcgtgcagaaaaagtgcagcgcaagtttctgggtcgtccgattgaagtttggaaactgtatttcacccatccgcaagatgtcccggcaatccgcgacaaaattcgtgcacacccggctgtgatcgatatttatgaatacgacatcccgtttgcgaaacgttatctgatcgataagggcctgattccgatggaaggtgacgaagaactgaccatgctggcctttgatattgaaacgctgtatcacgaaggcgaagaattcggcaccggtccgatcctgatgatttcatacgcagatggttcggaagctcgcgtgatcacctggaaaaagattgatctgccgtatgttgacgtcgtgagcacggaaaaagaaatgatcaagcgctttctgcgtattgtgaaagaaaaggatccggacgttctgattacctataacggcgataattttgacttcgcatacctgaaaaagcgttgcgaaaaactgggtatcaagttcacgctgggccgcgacggttctgaaccgaaaattcagcgcatgggcgatcgttttgcggttgaagtcaaaggtcgtatccatttcgatctgtatccggttatccgtcgcaccattaacctgccgacctatacgctggaagcggtttacgaagccgtctttggcaaaccgaaggaaaaagtgtacgcggaagaaattgcacaggcttgggaatcaggcgaaggtctggaacgcgtggcccgttattcgatggaagatgcaaaagttacctacgaactgggtcgcgaatttttcccgatggaagcccagctgagccgtctgatcggccaaagcctgtgggatgtttctcgcagctctacgggtaacctggtcgaatggtttctgctgcgtaaagcgtatgaacgcaacgaactggcgccgaataaaccggatgaacgcgaatatgaacgtcgcctgcgtgaaagttatgaaggcggttacgttaaagaaccggaacgcggcctgtgggaaggtattgtgtcactggattttcgtagtctgtacccgtccattatcattacccataacgtttcgccggatacgctgaataaagaaggctgcggtgaatatgacgaagccccggaagtgggtcaccgcttctgtaaagattttccgggcttcattccgtcactgctgggttcgctgctggaagaacgccagaagatcaagaaacgtatgaaggaatctaaggatccggtggaacgcaaactgctggactatcgtcaacgcgcgatcaagattctggccaacagcttttatggctattacggttacgcgaaagcccgttggtactgcaaggaatgtgcagaaagcgtgaccgcttggggccgccagtatattgaactggtccgtcgcgaactggaagaacgtggttttaaagtgctgtatatcgataccgacggcctgtacgccacgattccgggtgaaaagaactgggaagaaatcaagcgtcgcgcactggaatttgttaactacatcaattccaaactgccgggcattctggaactggaatatgaaggcttctacacccgtggctttttcgtgacgaagaaaaagtatgcgctgatcgatgaagaaggcaaaattgtcacccgtggtctggaaatcgtgcgtcgcgattggagtgaaattgccaaagaaacccaggcacgtgtgctggaagctctgctgaaagatggcaatgttgaagaagcggtttccattgtcaaagaagtgacggaaaagctgggtaaatatgaagtcccgccggaaaaactggtgatccatgaacaaattacccgcgaactgaaggattacaaagcgacgggcccgcacgttgctatcgcgaaacgtctggcagcgcgtggcgtgaagattcgtccgggtaccgttatcagctatattgtcctgaaaggctctggtcgtatcggtgaccgcgcgattccgtttgatgaattcgacccgacgaaacatcgctacgatgcagaatattacatcgaaaaccaggttctgccggctgtcgaacgtattctgaaagcgtttggctatcgtgccgaagatctgcgctaccagaaaacccgtcaagtgggcctgggtgtttggctgcaaccgaaaggtaagaaataa

SEQ ID NO: 39 - DNA, 2328 bp, Artificial Sequence
  Synthetic
atgattctggatacggactatattacggaaaatggcaagccggttattcgtgtgttcaaaaaggaaaatggcgaattcaagatcgaatatgatcgtacctttgaaccgtatttctacgctctgctgaaagatgacagcgcgatcgaagatgtcaaaaaggtgaccgccaaacgccatggcacggtggttcgcgtcaagcgtgcagaaaaagtgcagcgcaagtttctgggtcgtccgattgaagtttggaaactgtatttcacccatccgcaagatgtcccggcaatccgcgacaaaattcgtgcacacccggctgtgatcgatatttatgaatacgacatcccgtttgcgaaacgttatctgatcgataagggcctgattccgatggaaggtgacgaagaactgaccatgctggcctttgatattgaaacgctgtatcacgaaggcgaagaattcggcaccggtccgatcctgatgatttcatacgcagatggttcggaagctcgcgtgatcacctggaaaaagattgatctgccgtatgttgacgtcgtgagcacggaaaaagaaatgatcaagcgctttctgcgtattgtgaaagaaaaggatccggacgttctgattacctataacggcgataattttgacttcgcatacctgaaaaagcgttgcgaaaaactgggtatcaagttcacgctgggccgcgacggttctgaaccgaaaattcagcgcatgggcgatcgttttgcggttgaagtcaaaggtcgtatccatttcgatctgtatccggttatccgtcgcaccattaacctgccgacctatacgctggaagcggtttacgaagccgtctttggcaaaccgaaggaaaaagtgtacgcggaagaaattgcacaggcttgggaatcaggcgaaggtctggaacgcgtggcccgttattcgatggaagatgcaaaagttacctacgaactgggtcgcgaatttttcccgatggaagcccagctgagccgtctgatcggccaaagcctgtgggatgtttctcgcagctctacgggtaacctggtcgaatggtttctgctgcgtaaagcgtatgaacgcaacgaactggcgccgaataaaccggatgaacgcgaatatgaacgtcgcctgcgtgaaagttatgaaggcggttacgttaaagaaccggaacgcggcctgtgggaaggtattgtgtcactggattttcgtagtctgtacccgtccattatcattacccataacgtttcgccggatacgctgaataaagaaggctgcggtgaatatgacgaagccccggaagtgggtcaccgcttctgtaaagattttccgggcttcattccgtcactgctgggttcgctgctggaagaacgccagaagatcaagaaacgtatgaaggaatctaaggatccggtggaacgcaaactgctggactatcgtcaacgcgcgatcaagattctggccaacagcttttatggctattacggttacgcgaaagcccgttggtactgcaaggaatgtgcagaaagcgtgaccgcttggggccgccagtatattgaactggtccgtcgcgaactggaagaacgtggttttaaagtgctgtatatcgataccgacggcctgtacgccacgattccgggtgaaaagaactgggaagaaatcaagcgtcgcgcactggaatttgttaactacatcaattccaaactgccgggcattctggaactggaatatgaaggcttctacacccgtggctttttcgtgacgaagaaaaagtatgcgctgatcgatgaagaaggcaaaattgtcacccgtggtctggaaatcgtgcgtcgcgattggagtgaaattgccaaagaaacccaggcaaaggttctggaagcaattctgaaacatggtaacgtcgaagaagcggtcaagatcgtgaaagaagttaccgaaaaactgtcgaattatgaaattccggtcgaaaagctggtgatctacgaacaaattacgcgcccgctgaacgaatataaagccattggcccgcacgtggcagttgctaaacgtctggcggccaagggtatcaagattaaaccgggcatggtgattggttatgttgtcctgcgcggcgatggtccgatcagcaaacgtgcgatcgccatcgaagaattcgatggcaaaaagcataagtacgacgcagaatactacatcgaaaatcaggttctgccggccgtcgaacgtatcctgaaagcattcggttataagcgtgaagatctgcgctggcagaagaccaaacaagtgggcctgggtgcgtggctgaaagttaaaaagtcttaa

SEQ ID NO: 40 - DNA, 2331 bp, Artificial Sequence
  Synthetic
atgattctggatacggactatattacggaaaatggcaagccggttattcgtgtgttcaaaaaggaaaatggcgaattcaagatcgaatatgatcgtacctttgaaccgtatttctacgctctgctgaaagatgacagcgcgatcgaagatgtcaaaaaggtgaccgccaaacgccatggcacggtggttcgcgtcaagcgtgcagaaaaagtgcagcgcaagtttctgggtcgtccgattgaagtttggaaactgtatttcacccatccgcaagatgtcccggcaatccgcgacaaaattcgtgcacacccggctgtgatcgatatttatgaatacgacatcccgtttgcgaaacgttatctgatcgataagggcctgattccgatggaaggtgacgaagaactgaccatgctggcctttgatattgaaacgctgtatcacgaaggcgaagaattcggcaccggtccgatcctgatgatttcatacgcagatggttcggaagctcgcgtgatcacctggaaaaagattgatctgccgtatgttgacgtcgtgagcacggaaaaagaaatgatcaagcgctttctgcgtattgtgaaagaaaaggatccggacgttctgattacctataacggcgataattttgacttcgcatacctgaaaaagcgttgcgaaaaactgggtatcaagttcacgctgggccgcgacggttctgaaccgaaaattcagcgcatgggcgatcgttttgcggttgaagtcaaaggtcgtatccatttcgatctgtatccggttatccgtcgcaccattaacctgccgacctatacgctggaagcggtttacgaagccgtctttggcaaaccgaaggaaaaagtgtacgcggaagaaattgcacaggcttgggaatcaggcgaaggtctggaacgcgtggcccgttattcgatggaagatgcaaaagttacctacgaactgggtcgcgaatttttcccgatggaagcccagctgagccgtctgatcggccaaagcctgtgggatgtttctcgcagctctacgggtaacctggtcgaatggtttctgctgcgtaaagcgtatgaacgcaacgaactggcgccgaataaaccggatgaacgcgaatatgaacgtcgcctgcgtgaaagttatgaaggcggttacgttaaagaaccggaacgcggcctgtgggaaggtattgtgtcactggattttcgtagtctgtacccgtccattatcattacccataacgtttcgccggatacgctgaataaagaaggctgcggtgaatatgacgaagccccggaagtgggtcaccgcttctgtaaagattttccgggcttcattccgtcactgctgggttcgctgctggaagaacgccagaagatcaagaaacgtatgaaggaatctaaggatccggtggaacgcaaactgctggactatcgtcaacgcgcgatcaagattctggccaacagcttttatggctattacggttacgcgaaagcccgttggtactgcaaggaatgtgcagaaagcgtgaccgcttggggccgccagtatattgaactggtccgtcgcgaactggaagaacgtggttttaaagtgctgtatatcgataccgacggcctgtacgccacgattccgggtgaaaagaactgggaagaaatcaagcgtcgcgcactggaatttgttaactacatcaattccaaactgccgggcattctggaactggaatatgaaggcttctacacccgtggctttttcgtgacgaagaaaaagtatgcgctgatcgatgaagaaggcaaaattgtcacccgtggtctggaaatcgtgcgtcgcgattggagtgaaattgccaaagaaacccaggcacgtgttctggaagcactgctgaaagatggtaatgtcgaagaagcagtgagtattgttaaagaagtcacggaaaaactgtccaagtatgaagtcccgccggaaaaactggtgattcatgaacaaatcacccgcgaactgaaagattacaaggcgacgggcccgcacgtggcaattgctaaacgtctggcagcgcgtggcgttaagatccgtccgggtaccgttattagctatatcgtcctgaaaggctctggtcgtattggtgaccgcgccatcccgtttgatgaattcgacccggctaaacaccgctacgatgcggaatattacattgaaaatcaggtcctgccggctgtggaacgtatcctgaaagcgtttggctatcgtaaggaagatctgcgctaccagaaaacccgtcaagtgggcctgggtgcgtggctgaaaccgaagggtaaaaagtaa

SEQ ID NO: 41 - DNA, 2331 bp, Artificial Sequence
  Synthetic
atgattctggatacggactatattacggaaaatggcaagccggttattcgtgtgttcaaaaaggaaaatggcgaattcaagatcgaatatgatcgtacctttgaaccgtatttctacgctctgctgaaagatgacagcgcgatcgaagatgtcaaaaaggtgaccgccaaacgccatggcacggtggttcgcgtcaagcgtgcagaaaaagtgcagcgcaagtttctgggtcgtccgattgaagtttggaaactgtatttcacccatccgcaagatgtcccggcaatccgcgacaaaattcgtgcacacccggctgtgatcgatatttatgaatacgacatcccgtttgcgaaacgttatctgatcgataagggcctgattccgatggaaggtgacgaagaactgaccatgctggcctttgatattgaaacgctgtatcacgaaggcgaagaattcggcaccggtccgatcctgatgatttcatacgcagatggttcggaagctcgcgtgatcacctggaaaaagattgatctgccgtatgttgacgtcgtgagcacggaaaaagaaatgatcaagcgctttctgcgtattgtgaaagaaaaggatccggacgttctgattacctataacggcgataattttgacttcgcatacctgaaaaagcgttgcgaaaaactgggtatcaagttcacgctgggccgcgacggttctgaaccgaaaattcagcgcatgggcgatcgttttgcggttgaagtcaaaggtcgtatccatttcgatctgtatccggttatccgtcgcaccattaacctgccgacctatacgctggaagcggtttacgaagccgtctttggcaaaccgaaggaaaaagtgtacgcggaagaaattgcacaggcttgggaatcaggcgaaggtctggaacgcgtggcccgttattcgatggaagatgcaaaagttacctacgaactgggtcgcgaatttttcccgatggaagcccagctgagccgtctgatcggccaaagcctgtgggatgtttctcgcagctctacgggtaacctggtcgaatggtttctgctgcgtaaagcgtatgaacgcaacgaactggcgccgaataaaccggatgaacgcgaatatgaacgtcgcctgcgtgaaagttatgaaggcggttacgttaaagaaccggaacgcggcctgtgggaaggtattgtgtcactggattttcgtagtctgtacccgtccattatcattacccataacgtttcgccggatacgctgaataaagaaggctgcggtgaatatgacgaagccccggaagtgggtcaccgcttctgtaaagattttccgggcttcattccgtcactgctgggttcgctgctggaagaacgccagaagatcaagaaacgtatgaaggaatctaaggatccggtggaacgcaaactgctggactatcgtcaacgcgcgatcaagattctggccaacagcttttatggctattacggttacgcgaaagcccgttggtactgcaaggaatgtgcagaaagcgtgaccgcttggggccgccagtatattgaactggtccgtcgcgaactggaagaacgtggttttaaagtgctgtatatcgataccgacggcctgtacgccacgattccgggtgaaaagaactgggaagaaatcaagcgtcgcgcactggaatttgttaactacatcaattccaaactgccgggcattctggaactggaatatgaaggcttctacacccgtggctttttcgtgacgaagaaaaagtatgcgctgatcgatgaagaaggcaaaattgtcacccgtggtctggaaatcgtgcgtcgcgattggagtgaaattgccaaagaaacccaggcacgcgtcctggaagcaatcctgaaagatggtgacgtggaagaagccgtccgtattgtgaaagaagttacggaaaaactgtccaaatatgaagttccgccggaaaaactggtcatccatgaacaaattacccgcgaactgaaagattacaaagcgacgggcccgcacgtcgcaatcgctaaacgtctggcggcgcgtggcgtgaaaattcgtccgggtaccgtgatctcatatattgttctgaaaggctcgggtcgtatcggtgaccgcgctattccgtttgatgaattcgacccgaaaaaacacaaatacgatgcggaatactacatcgaaaaccaggttctgccggccgtcgaacgtattctgcgcgcatttggctaccgtaaagaagatctgcgttatcaaaaaaccaaacaagtgggtctgggtgcgtggctgaaaccgaaaggtaaaaaataa

SEQ ID NO: 42 - DNA, 2328 bp, Artificial Sequence
  Synthetic
atgattctggatacggactatattacggaaaatggcaagccggttattcgtgtgttcaaaaaggaaaatggcgaattcaagatcgaatatgatcgtacctttgaaccgtatttctacgctctgctgaaagatgacagcgcgatcgaagatgtcaaaaaggtgaccgccaaacgccatggcacggtggttcgcgtcaagcgtgcagaaaaagtgcagcgcaagtttctgggtcgtccgattgaagtttggaaactgtatttcacccatccgcaagatgtcccggcaatccgcgacaaaattcgtgcacacccggctgtgatcgatatttatgaatacgacatcccgtttgcgaaacgttatctgatcgataagggcctgattccgatggaaggtgacgaagaactgaccatgctggcctttgatattgaaacgctgtatcacgaaggcgaagaattcggcaccggtccgatcctgatgatttcatacgcagatggttcggaagctcgcgtgatcacctggaaaaagattgatctgccgtatgttgacgtcgtgagcacggaaaaagaaatgatcaagcgctttctgcgtattgtgaaagaaaaggatccggacgttctgattacctataacggcgataattttgacttcgcatacctgaaaaagcgttgcgaaaaactgggtatcaagttcacgctgggccgcgacggttctgaaccgaaaattcagcgcatgggcgatcgttttgcggttgaagtcaaaggtcgtatccatttcgatctgtatccggttatccgtcgcaccattaacctgccgacctatacgctggaagcggtttacgaagccgtctttggcaaaccgaaggaaaaagtgtacgcggaagaaattgcacaggcttgggaatcaggcgaaggtctggaacgcgtggcccgttattcgatggaagatgcaaaagttacctacgaactgggtcgcgaatttttcccgatggaagcccagctgagccgtctgatcggccaaagcctgtgggatgtttctcgcagctctacgggtaacctggtcgaatggtttctgctgcgtaaagcgtatgaacgcaacgaactggcgccgaataaaccggatgaacgcgaatatgaacgtcgcctgcgtgaaagttatgaaggcggttacgttaaagaaccggaacgcggcctgtgggaaggtattgtgtcactggattttcgtagtctgtacccgtccattatcattacccataacgtttcgccggatacgctgaataaagaaggctgcggtgaatatgacgaagccccggaagtgggtcaccgcttctgtaaagattttccgggcttcattccgtcactgctgggttcgctgctggaagaacgccagaagatcaagaaacgtatgaaggaatctaaggatccggtggaacgcaaactgctggactatcgtcaacgcgcgatcaagattctggccaacagcttttatggctattacggttacgcgaaagcccgttggtactgcaaggaatgtgcagaaagcgtgaccgcttggggccgccagtatattgaactggtccgtcgcgaactggaagaacgtggttttaaagtgctgtatatcgataccgacggcctgtacgccacgattccgggtgaaaagaactgggaagaaatcaagcgtcgcgcactggaatttgttaactacatcaattccaaactgccgggcattctggaactggaatatgaaggcttctacacccgtggctttttcgtgacgaagaaaaagtatgcgctgatcgatgaagaaggcaaaattgtcacccgtggtctggaaatcgtgcgtcgcgattggagtgaaattgccaaagaaacccaggcacgtgttctggaagcaattctgaaacatggtaacgtcgaagaagcggtcaaaatcgtgaaagaagttacggaaaaactgtctaactacgaaattccgccggaaaaactggccatctacgaacaaattacccgcccgctgcatgaatataaagcaatcggtccgcacgtcgcagtggcaaaacgtctggcagcacgcggcgttaaagtcaaaccgggtatggtcatcggctatattgtgctgcgtggtgatggcccgatcagcaaccgcgcaattctggctgaagaatacgatctgaaaaaacacaaatacgacgccgaatattacatcgaaaatcaggttctgccggctgtcctgcgtattctggaagcgtttggctatcgtaaagaagatctgcgctggcagaaaacccgtcaaacgggtctgacctcatggctgaatattaaaaaatcgtaa

SEQ ID NO: 43 - DNA, 2328 bp, Artificial Sequence
  Synthetic
atgattctggatacggactatattacggaaaatggcaagccggttattcgtgtgttcaaaaaggaaaatggcgaattcaagatcgaatatgatcgtacctttgaaccgtatttctacgctctgctgaaagatgacagcgcgatcgaagatgtcaaaaaggtgaccgccaaacgccatggcacggtggttcgcgtcaagcgtgcagaaaaagtgcagcgcaagtttctgggtcgtccgattgaagtttggaaactgtatttcacccatccgcaagatgtcccggcaatccgcgacaaaattcgtgcacacccggctgtgatcgatatttatgaatacgacatcccgtttgcgaaacgttatctgatcgataagggcctgattccgatggaaggtgacgaagaactgaccatgctggcctttgatattgaaacgctgtatcacgaaggcgaagaattcggcaccggtccgatcctgatgatttcatacgcagatggttcggaagctcgcgtgatcacctggaaaaagattgatctgccgtatgttgacgtcgtgagcacggaaaaagaaatgatcaagcgctttctgcgtattgtgaaagaaaaggatccggacgttctgattacctataacggcgataattttgacttcgcatacctgaaaaagcgttgcgaaaaactgggtatcaagttcacgctgggccgcgacggttctgaaccgaaaattcagcgcatgggcgatcgttttgcggttgaagtcaaaggtcgtatccatttcgatctgtatccggttatccgtcgcaccattaacctgccgacctatacgctggaagcggtttacgaagccgtctttggcaaaccgaaggaaaaagtgtacgcggaagaaattgcacaggcttgggaatcaggcgaaggtctggaacgcgtggcccgttattcgatggaagatgcaaaagttacctacgaactgggtcgcgaatttttcccgatggaagcccagctgagccgtctgatcggccaaagcctgtgggatgtttctcgcagctctacgggtaacctggtcgaatggtttctgctgcgtaaagcgtatgaacgcaacgaactggcgccgaataaaccggatgaacgcgaatatgaacgtcgcctgcgtgaaagttatgaaggcggttacgttaaagaaccggaacgcggcctgtgggaaggtattgtgtcactggattttcgtagtctgtacccgtccattatcattacccataacgtttcgccggatacgctgaataaagaaggctgcggtgaatatgacgaagccccggaagtgggtcaccgcttctgtaaagattttccgggcttcattccgtcactgctgggttcgctgctggaagaacgccagaagatcaagaaacgtatgaaggaatctaaggatccggtggaacgcaaactgctggactatcgtcaacgcgcgatcaagattctggccaacagcttttatggctattacggttacgcgaaagcccgttggtactgcaaggaatgtgcagaaagcgtgaccgcttggggccgccagtatattgaactggtccgtcgcgaactggaagaacgtggttttaaagtgctgtatatcgataccgacggcctgtacgccacgattccgggtgaaaagaactgggaagaaatcaagcgtcgcgcactggaatttgttaactacatcaattccaaactgccgggcattctggaactggaatatgaaggcttctacacccgtggctttttcgtgacgaagaaaaagtatgcgctgatcgatgaagaaggcaaaattgtcacccgtggtctggaaatcgtgcgtcgcgattggagtgaaattgccaaagaaacccaggcaaaagttctggaagcaatcctgaaacatggtaatgtcgaagaagcagtgaaaattgtcaaggaagtgacggaaaaactgtcgaagtatgaaatcccgccggaaaaactggtgatctacgaacaaattacccgcccgctgcatgaatataaagcgattggcccgcacgtggcagttgctaaacgtctggcagcccgcggtgtcaaagtgcgtccgggcatggtgatcggttatattgttctgcgtggcgatggtccgatcagtaaacgcgcgattctggccgaagaatttgatccgcgcaaacacaagtacgacgccgaatattacatcgaaaaccaggtgctgccggctgttctgcgtattctggaagcgttcggctatcgtaaagaagatctgcgctggcagaaaaccaagcaaacgggtctgaccgcatggctgaatgtgaaaaagaaataa

SEQ ID NO: 44 - DNA, 2328 bp, Artificial Sequence
  Synthetic
atgattctggatacggactatattacggaaaatggcaagccggttattcgtgtgttcaaaaaggaaaatggcgaattcaagatcgaatatgatcgtacctttgaaccgtatttctacgctctgctgaaagatgacagcgcgatcgaagatgtcaaaaaggtgaccgccaaacgccatggcacggtggttcgcgtcaagcgtgcagaaaaagtgcagcgcaagtttctgggtcgtccgattgaagtttggaaactgtatttcacccatccgcaagatgtcccggcaatccgcgacaaaattcgtgcacacccggctgtgatcgatatttatgaatacgacatcccgtttgcgaaacgttatctgatcgataagggcctgattccgatggaaggtgacgaagaactgaccatgctggcctttgatattgaaacgctgtatcacgaaggcgaagaattcggcaccggtccgatcctgatgatttcatacgcagatggttcggaagctcgcgtgatcacctggaaaaagattgatctgccgtatgttgacgtcgtgagcacggaaaaagaaatgatcaagcgctttctgcgtattgtgaaagaaaaggatccggacgttctgattacctataacggcgataattttgacttcgcatacctgaaaaagcgttgcgaaaaactgggtatcaagttcacgctgggccgcgacggttctgaaccgaaaattcagcgcatgggcgatcgttttgcggttgaagtcaaaggtcgtatccatttcgatctgtatccggttatccgtcgcaccattaacctgccgacctatacgctggaagcggtttacgaagccgtctttggcaaaccgaaggaaaaagtgtacgcggaagaaattgcacaggcttgggaatcaggcgaaggtctggaacgcgtggcccgttattcgatggaagatgcaaaagttacctacgaactgggtcgcgaatttttcccgatggaagcccagctgagccgtctgatcggccaaagcctgtgggatgtttctcgcagctctacgggtaacctggtcgaatggtttctgctgcgtaaagcgtatgaacgcaacgaactggcgccgaataaaccgtcgggccgcgaatacgatgaacgtcgcgaaggttatgcgggcggttacgttaaagaaccggaacgtggtctgtgggaaaacatcgtgtacctggattacaaaagtctgtatccgtccattatcattacccataacgtgagcccggacacgctgaatcgcgaaggctgcaaagaatacgatgtcgccccgcaagtgggtcacaaattttgtaaagactttccgggcttcattccgtctctgctgggtgatctgctggaagaacgtcagaaaattaaaaagaaaatgaaagcaaccaaagatccgattgagaaaaaactgctggactatcgtcaacgcgcgatcaaaattctggccaacagttattacggctattacggttatgcgaaagcccgctggtactgcaaagaatgtgcagaatccgttacggcttggggccgtgaatatatcgaaaccacgatccgcgaaatcgaagaaaaatacggtttcaaagtgctgtacgccgataccgacggcttccatgcaacgatcccgggtgaagatgctgaagaaattaagaaaaaagcgaaagaattcctgaaatacatcaacagcaaactgccgggcgccctggaactggaatatgaaggcttctaccgtcgcggctttttcgtgaccaagaaaaaatacgcagttatcgacgaagaaggcaaaattaccacgcgtggtctggaaatcgtgcgtcgcgattggagtgaaattgccaaagaaacccaggcacgcgttctggaagcaatcctgcgtcatggtgacgtcgaagaagccgttcgcattgtcaaagatgtgacggaaaagctgtcgaaatatgaagtcccgccggaaaaactggtgatccatgaacaaattacccgtgaactgaaggattacaaagcgacgggcccgcacgttgcaattgctaaacgcctggcagcccgtggcatcaagattcgtccgggtaccgttatcagctatattgtcctgaaaggctctggtcgcatcggtgatcgtgctattccgtttgatgaattcgacccgacgaaacaccgttacgatgccgaatattacatcgaaaatcaggtgctgccggccgttgaacgcattctgaaagcatttggctataagaaagaagaactgcgctaccagaaaacccgtcaagtgggcctgggtgcgtggctgaagctgaaaggtaagaaataa

SEQ ID NO: 45 - DNA, 2322 bp, Artificial Sequence
  Synthetic
atgattctggatacggactatattacggaaaatggcaagccggttattcgtgtgttcaaaaaggaaaatggcgaattcaagatcgaatatgatcgtacctttgaaccgtatttctacgctctgctgaaagatgacagcgcgatcgaagatgtcaaaaaggtgaccgccaaacgccatggcacggtggttcgcgtcaagcgtgcagaaaaagtgcagcgcaagtttctgggtcgtccgattgaagtttggaaactgtatttcacccatccgcaagatgtcccggcaatccgcgacaaaattcgtgcacacccggctgtgatcgatatttatgaatacgacatcccgtttgcgaaacgttatctgatcgataagggcctgattccgatggaaggtgacgaagaactgaccatgctggcctttgatattgaaacgctgtatcacgaaggcgaagaattcggcaccggtccgatcctgatgatttcatacgcagatggttcggaagctcgcgtgatcacctggaaaaagattgatctgccgtatgttgacgtcgtgagcacggaaaaagaaatgatcaagcgctttctgcgtattgtgaaagaaaaggatccggacgttctgattacctataacggcgataattttgacttcgcatacctgaaaaagcgttgcgaaaaactgggtatcaagttcacgctgggccgcgacggttctgaaccgaaaattcagcgcatgggcgatcgttttgcggttgaagtcaaaggtcgtatccatttcgatctgtatccggttatccgtcgcaccattaacctgccgacctatacgctggaagcggtttacgaagccgtctttggcaaaccgaaggaaaaagtgtacgcggaagaaattgcacaggcttgggaatcaggcgaaggtctggaacgcgtggcccgttattcgatggaagatgcaaaagttacctacgaactgggtcgcgaatttttcccgatggaagcccagctgagccgtctgatcggccaaagcctgtgggatgtttctcgcagctctacgggtaacctggtcgaatggtttctgctgcgtaaagcgtatgaacgcaacgaactggcgccgaataaaccgtcgggccgcgaatacgatgaacgtcgcgaaggttatgcgggcggttacgttaaagaaccggaacgtggtctgtgggaaaacatcgtgtacctggattacaaaagtctgtatccgtccattatcattacccataacgtgagcccggacacgctgaatcgcgaaggctgcaaagaatacgatgtcgccccgcaagtgggtcacaaattttgtaaagactttccgggcttcattccgtctctgctgggtgatctgctggaagaacgtcagaaaattaaaaagaaaatgaaagcaaccaaagatccgattgagaaaaaactgctggactatcgtcaacgcgcgatcaaaattctggccaacagttattacggctattacggttatgcgaaagcccgctggtactgcaaagaatgtgcagaatccgttacggcttggggccgtgaatatatcgaaaccacgatccgcgaaatcgaagaaaaatacggtttcaaagtgctgtacgccgataccgacggcttccatgcaacgatcccgggtgaagatgctgaagaaattaagaaaaaagcgaaagaattcctgaaatacatcaacagcaaactgccgggcgccctggaactggaatatgaaggcttctaccgtcgcggctttttcgtgaccaagaaaaaatacgcagttatcgacgaagaaggcaaaattaccacgcgtggtctggaaatcgtgcgtcgcgattggagtgaaattgccaaagaaacccaggcacgtgtcctggaagcaatcctgaaacatggtgatgtggaagaagcggttcgcattgtcaaagaagtgacggaaaagctgtcgaaatatgaagttccgccggaaaaactggtcatccatgaacaaattacccgcgatctgcgtgactacaaagccacgggtccgcacgtggcagttgcaaaacgtctggcagcccgtggcgtgaagattcgtccgggtaccgtgatcagttatattgttctgaaaggctccggtcgcatcggtgaccgtgctattccgtttgatgaattcgacccgacgaaacaccgttacgatgccgaatattacatcgaaaatcaggtcctgccggccgtggaacgcattctgaaagcatttggttatcgcaaggaagatctgcgttaccagaagaccaaacaagtcggcctgggtgcgtggctgaaagtgaaaaagtaa

SEQ ID NO: 46 - DNA, 2328 bp, Artificial Sequence
  Synthetic
atgattctggatacggactatattacggaaaatggcaagccggttattcgtgtgttcaaaaaggaaaatggcgaattcaagatcgaatatgatcgtacctttgaaccgtatttctacgctctgctgaaagatgacagcgcgatcgaagatgtcaaaaaggtgaccgccaaacgccatggcacggtggttcgcgtcaagcgtgcagaaaaagtgcagcgcaagtttctgggtcgtccgattgaagtttggaaactgtatttcacccatccgcaagatgtcccggcaatccgcgacaaaattcgtgcacacccggctgtgatcgatatttatgaatacgacatcccgtttgcgaaacgttatctgatcgataagggcctgattccgatggaaggtgacgaagaactgaccatgctggcctttgatattgaaacgctgtatcacgaaggcgaagaattcggcaccggtccgatcctgatgatttcatacgcagatggttcggaagctcgcgtgatcacctggaaaaagattgatctgccgtatgttgacgtcgtgagcacggaaaaagaaatgatcaagcgctttctgcgtattgtgaaagaaaaggatccggacgttctgattacctataacggcgataattttgacttcgcatacctgaaaaagcgttgcgaaaaactgggtatcaagttcacgctgggccgcgacggttctgaaccgaaaattcagcgcatgggcgatcgttttgcggttgaagtcaaaggtcgtatccatttcgatctgtatccggttatccgtcgcaccattaacctgccgacctatacgctggaagcggtttacgaagccgtctttggcaaaccgaaggaaaaagtgtacgcggaagaaattgcacaggcttgggaatcaggcgaaggtctggaacgcgtggcccgttattcgatggaagatgcaaaagttacctacgaactgggtcgcgaatttttcccgatggaagcccagctgagccgtctgatcggccaaagcctgtgggatgtttctcgcagctctacgggtaacctggtcgaatggtttctgctgcgtaaagcgtatgaacgcaacgaactggcgccgaataaaccgtcgggccgcgaatacgatgaacgtcgcgaaggttatgcgggcggttacgttaaagaaccggaacgtggtctgtgggaaaacatcgtgtacctggattacaaaagtctgtatccgtccattatcattacccataacgtgagcccggacacgctgaatcgcgaaggctgcaaagaatacgatgtcgccccgcaagtgggtcacaaattttgtaaagactttccgggcttcattccgtctctgctgggtgatctgctggaagaacgtcagaaaattaaaaagaaaatgaaagcaaccaaagatccgattgagaaaaaactgctggactatcgtcaacgcgcgatcaaaattctggccaacagttattacggctattacggttatgcgaaagcccgctggtactgcaaagaatgtgcagaatccgttacggcttggggccgtgaatatatcgaaaccacgatccgcgaaatcgaagaaaaatacggtttcaaagtgctgtacgccgataccgacggcttccatgcaacgatcccgggtgaagatgctgaagaaattaagaaaaaagcgaaagaattcctgaaatacatcaacagcaaactgccgggcgccctggaactggaatatgaaggcttctaccgtcgcggctttttcgtgaccaagaaaaaatacgcagttatcgacgaagaaggcaaaattaccacgcgtggtctggaaatcgtgcgtcgcgattggagtgaaattgccaaagaaacccaggcacgtgtgctggaagctctgctgaaagatggcaatgttgaagaagcggtttccattgtcaaagaagtgacggaaaagctgggtaaatatgaagtcccgccggaaaaactggtgatccatgaacaaattacccgcgaactgaaggattacaaagcgacgggcccgcacgttgctatcgcgaaacgtctggcagcgcgtggcgtgaagattcgtccgggtaccgttatcagctatattgtcctgaaaggctctggtcgtatcggtgaccgcgcgattccgtttgatgaattcgacccgacgaaacatcgctacgatgcagaatattacatcgaaaaccaggttctgccggctgtcgaacgtattctgaaagcgtttggctatcgtgccgaagatctgcgctaccagaaaacccgtcaagtgggcctgggtgtttggctgcaaccgaaaggtaagaaataa

SEQ ID NO: 47 - DNA, 2325 bp, Artificial Sequence
  Synthetic
atgattctggatacggactatattacggaaaatggcaagccggttattcgtgtgttcaaaaaggaaaatggcgaattcaagatcgaatatgatcgtacctttgaaccgtatttctacgctctgctgaaagatgacagcgcgatcgaagatgtcaaaaaggtgaccgccaaacgccatggcacggtggttcgcgtcaagcgtgcagaaaaagtgcagcgcaagtttctgggtcgtccgattgaagtttggaaactgtatttcacccatccgcaagatgtcccggcaatccgcgacaaaattcgtgcacacccggctgtgatcgatatttatgaatacgacatcccgtttgcgaaacgttatctgatcgataagggcctgattccgatggaaggtgacgaagaactgaccatgctggcctttgatattgaaacgctgtatcacgaaggcgaagaattcggcaccggtccgatcctgatgatttcatacgcagatggttcggaagctcgcgtgatcacctggaaaaagattgatctgccgtatgttgacgtcgtgagcacggaaaaagaaatgatcaagcgctttctgcgtattgtgaaagaaaaggatccggacgttctgattacctataacggcgataattttgacttcgcatacctgaaaaagcgttgcgaaaaactgggtatcaagttcacgctgggccgcgacggttctgaaccgaaaattcagcgcatgggcgatcgttttgcggttgaagtcaaaggtcgtatccatttcgatctgtatccggttatccgtcgcaccattaacctgccgacctatacgctggaagcggtttacgaagccgtctttggcaaaccgaaggaaaaagtgtacgcggaagaaattgcacaggcttgggaatcaggcgaaggtctggaacgcgtggcccgttattcgatggaagatgcaaaagttacctacgaactgggtcgcgaatttttcccgatggaagcccagctgagccgtctgatcggccaaagcctgtgggatgtttctcgcagctctacgggtaacctggtcgaatggtttctgctgcgtaaagcgtatgaacgcaacgaactggcgccgaataaaccgtcgggccgcgaatacgatgaacgtcgcgaaggttatgcgggcggttacgttaaagaaccggaacgtggtctgtgggaaaacatcgtgtacctggattacaaaagtctgtatccgtccattatcattacccataacgtgagcccggacacgctgaatcgcgaaggctgcaaagaatacgatgtcgccccgcaagtgggtcacaaattttgtaaagactttccgggcttcattccgtctctgctgggtgatctgctggaagaacgtcagaaaattaaaaagaaaatgaaagcaaccaaagatccgattgagaaaaaactgctggactatcgtcaacgcgcgatcaaaattctggccaacagttattacggctattacggttatgcgaaagcccgctggtactgcaaagaatgtgcagaatccgttacggcttggggccgtgaatatatcgaaaccacgatccgcgaaatcgaagaaaaatacggtttcaaagtgctgtacgccgataccgacggcttccatgcaacgatcccgggtgaagatgctgaagaaattaagaaaaaagcgaaagaattcctgaaatacatcaacagcaaactgccgggcgccctggaactggaatatgaaggcttctaccgtcgcggctttttcgtgaccaagaaaaaatacgcagttatcgacgaagaaggcaaaattaccacgcgtggtctggaaatcgtgcgtcgcgattggagtgaaattgccaaagaaacccaggcaaaggttctggaagcaattctgaaacatggtaacgtcgaagaagcggtcaagatcgtgaaagaagttaccgaaaaactgtcgaattatgaaattccggtcgaaaagctggtgatctacgaacaaattacgcgcccgctgaacgaatataaagccattggcccgcacgtggcagttgctaaacgtctggcggccaagggtatcaagattaaaccgggcatggtgattggttatgttgtcctgcgcggcgatggtccgatcagcaaacgtgcgatcgccatcgaagaattcgatggcaaaaagcataagtacgacgcagaatactacatcgaaaatcaggttctgccggccgtcgaacgtatcctgaaagcattcggttataagcgtgaagatctgcgctggcagaagaccaaacaagtgggcctgggtgcgtggctgaaagttaaaaagtcttaa

SEQ ID NO: 48 - DNA, 2328 bp, Artificial Sequence
  Synthetic
atgattctggatacggactatattacggaaaatggcaagccggttattcgtgtgttcaaaaaggaaaatggcgaattcaagatcgaatatgatcgtacctttgaaccgtatttctacgctctgctgaaagatgacagcgcgatcgaagatgtcaaaaaggtgaccgccaaacgccatggcacggtggttcgcgtcaagcgtgcagaaaaagtgcagcgcaagtttctgggtcgtccgattgaagtttggaaactgtatttcacccatccgcaagatgtcccggcaatccgcgacaaaattcgtgcacacccggctgtgatcgatatttatgaatacgacatcccgtttgcgaaacgttatctgatcgataagggcctgattccgatggaaggtgacgaagaactgaccatgctggcctttgatattgaaacgctgtatcacgaaggcgaagaattcggcaccggtccgatcctgatgatttcatacgcagatggttcggaagctcgcgtgatcacctggaaaaagattgatctgccgtatgttgacgtcgtgagcacggaaaaagaaatgatcaagcgctttctgcgtattgtgaaagaaaaggatccggacgttctgattacctataacggcgataattttgacttcgcatacctgaaaaagcgttgcgaaaaactgggtatcaagttcacgctgggccgcgacggttctgaaccgaaaattcagcgcatgggcgatcgttttgcggttgaagtcaaaggtcgtatccatttcgatctgtatccggttatccgtcgcaccattaacctgccgacctatacgctggaagcggtttacgaagccgtctttggcaaaccgaaggaaaaagtgtacgcggaagaaattgcacaggcttgggaatcaggcgaaggtctggaacgcgtggcccgttattcgatggaagatgcaaaagttacctacgaactgggtcgcgaatttttcccgatggaagcccagctgagccgtctgatcggccaaagcctgtgggatgtttctcgcagctctacgggtaacctggtcgaatggtttctgctgcgtaaagcgtatgaacgcaacgaactggcgccgaataaaccgtcgggccgcgaatacgatgaacgtcgcgaaggttatgcgggcggttacgttaaagaaccggaacgtggtctgtgggaaaacatcgtgtacctggattacaaaagtctgtatccgtccattatcattacccataacgtgagcccggacacgctgaatcgcgaaggctgcaaagaatacgatgtcgccccgcaagtgggtcacaaattttgtaaagactttccgggcttcattccgtctctgctgggtgatctgctggaagaacgtcagaaaattaaaaagaaaatgaaagcaaccaaagatccgattgagaaaaaactgctggactatcgtcaacgcgcgatcaaaattctggccaacagttattacggctattacggttatgcgaaagcccgctggtactgcaaagaatgtgcagaatccgttacggcttggggccgtgaatatatcgaaaccacgatccgcgaaatcgaagaaaaatacggtttcaaagtgctgtacgccgataccgacggcttccatgcaacgatcccgggtgaagatgctgaagaaattaagaaaaaagcgaaagaattcctgaaatacatcaacagcaaactgccgggcgccctggaactggaatatgaaggcttctaccgtcgcggctttttcgtgaccaagaaaaaatacgcagttatcgacgaagaaggcaaaattaccacgcgtggtctggaaatcgtgcgtcgcgattggagtgaaattgccaaagaaacccaggcacgtgttctggaagcactgctgaaagatggtaatgtcgaagaagcagtgagtattgttaaagaagtcacggaaaaactgtccaagtatgaagtcccgccggaaaaactggtgattcatgaacaaatcacccgcgaactgaaagattacaaggcgacgggcccgcacgtggcaattgctaaacgtctggcagcgcgtggcgttaagatccgtccgggtaccgttattagctatatcgtcctgaaaggctctggtcgtattggtgaccgcgccatcccgtttgatgaattcgacccggctaaacaccgctacgatgcggaatattacattgaaaatcaggtcctgccggctgtggaacgtatcctgaaagcgtttggctatcgtaaggaagatctgcgctaccagaaaacccgtcaagtgggcctgggtgcgtggctgaaaccgaagggtaaaaagtaa

SEQ ID NO: 49 - DNA, 2328 bp, Artificial Sequence
  Synthetic
atgattctggatacggactatattacggaaaatggcaagccggttattcgtgtgttcaaaaaggaaaatggcgaattcaagatcgaatatgatcgtacctttgaaccgtatttctacgctctgctgaaagatgacagcgcgatcgaagatgtcaaaaaggtgaccgccaaacgccatggcacggtggttcgcgtcaagcgtgcagaaaaagtgcagcgcaagtttctgggtcgtccgattgaagtttggaaactgtatttcacccatccgcaagatgtcccggcaatccgcgacaaaattcgtgcacacccggctgtgatcgatatttatgaatacgacatcccgtttgcgaaacgttatctgatcgataagggcctgattccgatggaaggtgacgaagaactgaccatgctggcctttgatattgaaacgctgtatcacgaaggcgaagaattcggcaccggtccgatcctgatgatttcatacgcagatggttcggaagctcgcgtgatcacctggaaaaagattgatctgccgtatgttgacgtcgtgagcacggaaaaagaaatgatcaagcgctttctgcgtattgtgaaagaaaaggatccggacgttctgattacctataacggcgataattttgacttcgcatacctgaaaaagcgttgcgaaaaactgggtatcaagttcacgctgggccgcgacggttctgaaccgaaaattcagcgcatgggcgatcgttttgcggttgaagtcaaaggtcgtatccatttcgatctgtatccggttatccgtcgcaccattaacctgccgacctatacgctggaagcggtttacgaagccgtctttggcaaaccgaaggaaaaagtgtacgcggaagaaattgcacaggcttgggaatcaggcgaaggtctggaacgcgtggcccgttattcgatggaagatgcaaaagttacctacgaactgggtcgcgaatttttcccgatggaagcccagctgagccgtctgatcggccaaagcctgtgggatgtttctcgcagctctacgggtaacctggtcgaatggtttctgctgcgtaaagcgtatgaacgcaacgaactggcgccgaataaaccgtcgggccgcgaatacgatgaacgtcgcgaaggttatgcgggcggttacgttaaagaaccggaacgtggtctgtgggaaaacatcgtgtacctggattacaaaagtctgtatccgtccattatcattacccataacgtgagcccggacacgctgaatcgcgaaggctgcaaagaatacgatgtcgccccgcaagtgggtcacaaattttgtaaagactttccgggcttcattccgtctctgctgggtgatctgctggaagaacgtcagaaaattaaaaagaaaatgaaagcaaccaaagatccgattgagaaaaaactgctggactatcgtcaacgcgcgatcaaaattctggccaacagttattacggctattacggttatgcgaaagcccgctggtactgcaaagaatgtgcagaatccgttacggcttggggccgtgaatatatcgaaaccacgatccgcgaaatcgaagaaaaatacggtttcaaagtgctgtacgccgataccgacggcttccatgcaacgatcccgggtgaagatgctgaagaaattaagaaaaaagcgaaagaattcctgaaatacatcaacagcaaactgccgggcgccctggaactggaatatgaaggcttctaccgtcgcggctttttcgtgaccaagaaaaaatacgcagttatcgacgaagaaggcaaaattaccacgcgtggtctggaaatcgtgcgtcgcgattggagtgaaattgccaaagaaacccaggcacgcgtcctggaagcaatcctgaaagatggtgacgtggaagaagccgtccgtattgtgaaagaagttacggaaaaactgtccaaatatgaagttccgccggaaaaactggtcatccatgaacaaattacccgcgaactgaaagattacaaagcgacgggcccgcacgtcgcaatcgctaaacgtctggcggcgcgtggcgtgaaaattcgtccgggtaccgtgatctcatatattgttctgaaaggctcgggtcgtatcggtgaccgcgctattccgtttgatgaattcgacccgaaaaaacacaaatacgatgcggaatactacatcgaaaaccaggttctgccggccgtcgaacgtattctgcgcgcatttggctaccgtaaagaagatctgcgttatcaaaaaaccaaacaagtgggtctgggtgcgtggctgaaaccgaaaggtaaaaaataa

SEQ ID NO: 50 - DNA, 2325 bp, Artificial Sequence
  Synthetic
atgattctggatacggactatattacggaaaatggcaagccggttattcgtgtgttcaaaaaggaaaatggcgaattcaagatcgaatatgatcgtacctttgaaccgtatttctacgctctgctgaaagatgacagcgcgatcgaagatgtcaaaaaggtgaccgccaaacgccatggcacggtggttcgcgtcaagcgtgcagaaaaagtgcagcgcaagtttctgggtcgtccgattgaagtttggaaactgtatttcacccatccgcaagatgtcccggcaatccgcgacaaaattcgtgcacacccggctgtgatcgatatttatgaatacgacatcccgtttgcgaaacgttatctgatcgataagggcctgattccgatggaaggtgacgaagaactgaccatgctggcctttgatattgaaacgctgtatcacgaaggcgaagaattcggcaccggtccgatcctgatgatttcatacgcagatggttcggaagctcgcgtgatcacctggaaaaagattgatctgccgtatgttgacgtcgtgagcacggaaaaagaaatgatcaagcgctttctgcgtattgtgaaagaaaaggatccggacgttctgattacctataacggcgataattttgacttcgcatacctgaaaaagcgttgcgaaaaactgggtatcaagttcacgctgggccgcgacggttctgaaccgaaaattcagcgcatgggcgatcgttttgcggttgaagtcaaaggtcgtatccatttcgatctgtatccggttatccgtcgcaccattaacctgccgacctatacgctggaagcggtttacgaagccgtctttggcaaaccgaaggaaaaagtgtacgcggaagaaattgcacaggcttgggaatcaggcgaaggtctggaacgcgtggcccgttattcgatggaagatgcaaaagttacctacgaactgggtcgcgaatttttcccgatggaagcccagctgagccgtctgatcggccaaagcctgtgggatgtttctcgcagctctacgggtaacctggtcgaatggtttctgctgcgtaaagcgtatgaacgcaacgaactggcgccgaataaaccgtcgggccgcgaatacgatgaacgtcgcgaaggttatgcgggcggttacgttaaagaaccggaacgtggtctgtgggaaaacatcgtgtacctggattacaaaagtctgtatccgtccattatcattacccataacgtgagcccggacacgctgaatcgcgaaggctgcaaagaatacgatgtcgccccgcaagtgggtcacaaattttgtaaagactttccgggcttcattccgtctctgctgggtgatctgctggaagaacgtcagaaaattaaaaagaaaatgaaagcaaccaaagatccgattgagaaaaaactgctggactatcgtcaacgcgcgatcaaaattctggccaacagttattacggctattacggttatgcgaaagcccgctggtactgcaaagaatgtgcagaatccgttacggcttggggccgtgaatatatcgaaaccacgatccgcgaaatcgaagaaaaatacggtttcaaagtgctgtacgccgataccgacggcttccatgcaacgatcccgggtgaagatgctgaagaaattaagaaaaaagcgaaagaattcctgaaatacatcaacagcaaactgccgggcgccctggaactggaatatgaaggcttctaccgtcgcggctttttcgtgaccaagaaaaaatacgcagttatcgacgaagaaggcaaaattaccacgcgtggtctggaaatcgtgcgtcgcgattggagtgaaattgccaaagaaacccaggcacgtgttctggaagcaattctgaaacatggtaacgtcgaagaagcggtcaaaatcgtgaaagaagttacggaaaaactgtctaactacgaaattccgccggaaaaactggccatctacgaacaaattacccgcccgctgcatgaatataaagcaatcggtccgcacgtcgcagtggcaaaacgtctggcagcacgcggcgttaaagtcaaaccgggtatggtcatcggctatattgtgctgcgtggtgatggcccgatcagcaaccgcgcaattctggctgaagaatacgatctgaaaaaacacaaatacgacgccgaatattacatcgaaaatcaggttctgccggctgtcctgcgtattctggaagcgtttggctatcgtaaagaagatctgcgctggcagaaaacccgtcaaacgggtctgacctcatggctgaatattaaaaaatcgtaa

SEQ ID NO: 51 - DNA, 2325 bp, Artificial Sequence
  Synthetic
atgattctggatacggactatattacggaaaatggcaagccggttattcgtgtgttcaaaaaggaaaatggcgaattcaagatcgaatatgatcgtacctttgaaccgtatttctacgctctgctgaaagatgacagcgcgatcgaagatgtcaaaaaggtgaccgccaaacgccatggcacggtggttcgcgtcaagcgtgcagaaaaagtgcagcgcaagtttctgggtcgtccgattgaagtttggaaactgtatttcacccatccgcaagatgtcccggcaatccgcgacaaaattcgtgcacacccggctgtgatcgatatttatgaatacgacatcccgtttgcgaaacgttatctgatcgataagggcctgattccgatggaaggtgacgaagaactgaccatgctggcctttgatattgaaacgctgtatcacgaaggcgaagaattcggcaccggtccgatcctgatgatttcatacgcagatggttcggaagctcgcgtgatcacctggaaaaagattgatctgccgtatgttgacgtcgtgagcacggaaaaagaaatgatcaagcgctttctgcgtattgtgaaagaaaaggatccggacgttctgattacctataacggcgataattttgacttcgcatacctgaaaaagcgttgcgaaaaactgggtatcaagttcacgctgggccgcgacggttctgaaccgaaaattcagcgcatgggcgatcgttttgcggttgaagtcaaaggtcgtatccatttcgatctgtatccggttatccgtcgcaccattaacctgccgacctatacgctggaagcggtttacgaagccgtctttggcaaaccgaaggaaaaagtgtacgcggaagaaattgcacaggcttgggaatcaggcgaaggtctggaacgcgtggcccgttattcgatggaagatgcaaaagttacctacgaactgggtcgcgaatttttcccgatggaagcccagctgagccgtctgatcggccaaagcctgtgggatgtttctcgcagctctacgggtaacctggtcgaatggtttctgctgcgtaaagcgtatgaacgcaacgaactggcgccgaataaaccgtcgggccgcgaatacgatgaacgtcgcgaaggttatgcgggcggttacgttaaagaaccggaacgtggtctgtgggaaaacatcgtgtacctggattacaaaagtctgtatccgtccattatcattacccataacgtgagcccggacacgctgaatcgcgaaggctgcaaagaatacgatgtcgccccgcaagtgggtcacaaattttgtaaagactttccgggcttcattccgtctctgctgggtgatctgctggaagaacgtcagaaaattaaaaagaaaatgaaagcaaccaaagatccgattgagaaaaaactgctggactatcgtcaacgcgcgatcaaaattctggccaacagttattacggctattacggttatgcgaaagcccgctggtactgcaaagaatgtgcagaatccgttacggcttggggccgtgaatatatcgaaaccacgatccgcgaaatcgaagaaaaatacggtttcaaagtgctgtacgccgataccgacggcttccatgcaacgatcccgggtgaagatgctgaagaaattaagaaaaaagcgaaagaattcctgaaatacatcaacagcaaactgccgggcgccctggaactggaatatgaaggcttctaccgtcgcggctttttcgtgaccaagaaaaaatacgcagttatcgacgaagaaggcaaaattaccacgcgtggtctggaaatcgtgcgtcgcgattggagtgaaattgccaaagaaacccaggcaaaagttctggaagcaatcctgaaacatggtaatgtcgaagaagcagtgaaaattgtcaaggaagtgacggaaaaactgtcgaagtatgaaatcccgccggaaaaactggtgatctacgaacaaattacccgcccgctgcatgaatataaagcgattggcccgcacgtggcagttgctaaacgtctggcagcccgcggtgtcaaagtgcgtccgggcatggtgatcggttatattgttctgcgtggcgatggtccgatcagtaaacgcgcgattctggccgaagaatttgatccgcgcaaacacaagtacgacgccgaatattacatcgaaaaccaggtgctgccggctgttctgcgtattctggaagcgttcggctatcgtaaagaagatctgcgctggcagaaaaccaagcaaacgggtctgaccgcatggctgaatgtgaaaaagaaataa

SEQ ID NO: 52 - DNA, 2331 bp, Artificial Sequence
  Synthetic
atgattctggatacggactatattacggaaaatggcaagccggttattcgtgtgttcaaaaaggaaaatggcgaattcaagatcgaatatgatcgtacctttgaaccgtatttctacgctctgctgaaagatgacagcgcgatcgaagatgtcaaaaaggtgaccgccaaacgccatggcacggtggttcgcgtcaagcgtgcagaaaaagtgcagcgcaagtttctgggtcgtccgattgaagtttggaaactgtatttcacccatccgcaagatgtcccggcaatccgcgacaaaattcgtgcacacccggctgtgatcgatatttatgaatacgacatcccgtttgcgaaacgttatctgatcgataagggcctgattccgatggaaggtgacgaagaactgaccatgctggcctttgatattgaaacgctgtatcacgaaggcgaagaattcggcaccggtccgatcctgatgatttcatacgcagatggttcggaagctcgcgtgatcacctggaaaaagattgatctgccgtatgttgacgtcgtgagcacggaaaaagaaatgatcaagcgctttctgcgtattgtgaaagaaaaggatccggacgttctgattacctataacggcgataattttgacttcgcatacctgaaaaagcgttgcgaaaaactgggtatcaagttcacgctgggccgcgacggttctgaaccgaaaattcagcgcatgggcgatcgttttgcggttgaagtcaaaggtcgtatccatttcgatctgtatccggttatccgtcgcaccattaacctgccgacctatacgctggaagcggtttacgaagccgtctttggcaaaccgaaggaaaaagtgtacgcggaagaaattgcacaggcttgggaatcaggcgaaggtctggaacgcgtggcccgttattcgatggaagatgcaaaagttacctacgaactgggtcgcgaatttttcccgatggaagcccagctgagccgtctgatcggccaaagcctgtgggatgtttctcgcagctctacgggtaacctggtcgaatggtttctgctgcgtaaagcgtatgaacgcaacgaactggcaccgaataaaccggatgaacgtgaatatgaacgtcgcctgcgcgaatcttatgccggcggttacgttaaggaaccggaaaaaggcctgtgggaaggtctggtgtctctggattttcgctcactgtacccgtcgattatcattacgcataacgtgtccccggacaccctgaatcgtgaaggctgcatggaatatgatgttgctccggaagtcaaacacaagttttgtaaagactttccgggtttcattccgtcactgctgaaacgtctgctggatgaacgccaggaaatcaaacgtcgcatgaaagcctcgaaggatccgattgaaaagaaaatgctggactatcgtcaacgcgcaatcaaaattctggctaatagctattacggctattacggttatgcgaaggcccgctggtactgcaaagaatgtgcggaatctgtcacggcctggggccgtgaatatatcgaatttgtgcgcaaagaactggaagaaaagttcggtttcaaggttctgtacattgatacggacggcctgtacgcaaccatcccgggtgctaaaccggaagaaattaagcgtaaggccctggaatttgtggaatacatcaacgcaaaactgccgggcctgctggaactggaatatgaaggcttctacgttcgcggctttttcgtcacgaagaaaaagtatgcgctgattgacgaagaaggcaaaatcattacccgtggtctggaaatcgttcgtcgcgattggagtgaaattgccaaagaaacccaggcacgcgttctggaagcaatcctgcgtcatggtgacgtcgaagaagccgttcgcattgtcaaagatgtgacggaaaagctgtcgaaatatgaagtcccgccggaaaaactggtgatccatgaacaaattacccgtgaactgaaggattacaaagcgacgggcccgcacgttgcaattgctaaacgcctggcagcccgtggcatcaagattcgtccgggtaccgttatcagctatattgtcctgaaaggctctggtcgcatcggtgatcgtgctattccgtttgatgaattcgacccgacgaaacaccgttacgatgccgaatattacatcgaaaatcaggtgctgccggccgttgaacgcattctgaaagcatttggctataagaaagaagaactgcgctaccagaaaacccgtcaagtgggcctgggtgcgtggctgaagctgaaaggtaagaaataa

SEQ ID NO: 53 - DNA, 2325 bp, Artificial Sequence
  Synthetic
atgattctggatacggactatattacggaaaatggcaagccggttattcgtgtgttcaaaaaggaaaatggcgaattcaagatcgaatatgatcgtacctttgaaccgtatttctacgctctgctgaaagatgacagcgcgatcgaagatgtcaaaaaggtgaccgccaaacgccatggcacggtggttcgcgtcaagcgtgcagaaaaagtgcagcgcaagtttctgggtcgtccgattgaagtttggaaactgtatttcacccatccgcaagatgtcccggcaatccgcgacaaaattcgtgcacacccggctgtgatcgatatttatgaatacgacatcccgtttgcgaaacgttatctgatcgataagggcctgattccgatggaaggtgacgaagaactgaccatgctggcctttgatattgaaacgctgtatcacgaaggcgaagaattcggcaccggtccgatcctgatgatttcatacgcagatggttcggaagctcgcgtgatcacctggaaaaagattgatctgccgtatgttgacgtcgtgagcacggaaaaagaaatgatcaagcgctttctgcgtattgtgaaagaaaaggatccggacgttctgattacctataacggcgataattttgacttcgcatacctgaaaaagcgttgcgaaaaactgggtatcaagttcacgctgggccgcgacggttctgaaccgaaaattcagcgcatgggcgatcgttttgcggttgaagtcaaaggtcgtatccatttcgatctgtatccggttatccgtcgcaccattaacctgccgacctatacgctggaagcggtttacgaagccgtctttggcaaaccgaaggaaaaagtgtacgcggaagaaattgcacaggcttgggaatcaggcgaaggtctggaacgcgtggcccgttattcgatggaagatgcaaaagttacctacgaactgggtcgcgaatttttcccgatggaagcccagctgagccgtctgatcggccaaagcctgtgggatgtttctcgcagctctacgggtaacctggtcgaatggtttctgctgcgtaaagcgtatgaacgcaacgaactggcaccgaataaaccggatgaacgtgaatatgaacgtcgcctgcgcgaatcttatgccggcggttacgttaaggaaccggaaaaaggcctgtgggaaggtctggtgtctctggattttcgctcactgtacccgtcgattatcattacgcataacgtgtccccggacaccctgaatcgtgaaggctgcatggaatatgatgttgctccggaagtcaaacacaagttttgtaaagactttccgggtttcattccgtcactgctgaaacgtctgctggatgaacgccaggaaatcaaacgtcgcatgaaagcctcgaaggatccgattgaaaagaaaatgctggactatcgtcaacgcgcaatcaaaattctggctaatagctattacggctattacggttatgcgaaggcccgctggtactgcaaagaatgtgcggaatctgtcacggcctggggccgtgaatatatcgaatttgtgcgcaaagaactggaagaaaagttcggtttcaaggttctgtacattgatacggacggcctgtacgcaaccatcccgggtgctaaaccggaagaaattaagcgtaaggccctggaatttgtggaatacatcaacgcaaaactgccgggcctgctggaactggaatatgaaggcttctacgttcgcggctttttcgtcacgaagaaaaagtatgcgctgattgacgaagaaggcaaaatcattacccgtggtctggaaatcgttcgtcgcgattggagtgaaattgccaaagaaacccaggcacgtgtcctggaagcaatcctgaaacatggtgatgtggaagaagcggttcgcattgtcaaagaagtgacggaaaagctgtcgaaatatgaagttccgccggaaaaactggtcatccatgaacaaattacccgcgatctgcgtgactacaaagccacgggtccgcacgtggcagttgcaaaacgtctggcagcccgtggcgtgaagattcgtccgggtaccgtgatcagttatattgttctgaaaggctccggtcgcatcggtgaccgtgctattccgtttgatgaattcgacccgacgaaacaccgttacgatgccgaatattacatcgaaaatcaggtcctgccggccgtggaacgcattctgaaagcatttggttatcgcaaggaagatctgcgttaccagaagaccaaacaagtcggcctgggtgcgtggctgaaagtgaaaaagtaa

SEQ ID NO: 54 - DNA, 2331 bp, Artificial Sequence
  Synthetic
atgattctggatacggactatattacggaaaatggcaagccggttattcgtgtgttcaaaaaggaaaatggcgaattcaagatcgaatatgatcgtacctttgaaccgtatttctacgctctgctgaaagatgacagcgcgatcgaagatgtcaaaaaggtgaccgccaaacgccatggcacggtggttcgcgtcaagcgtgcagaaaaagtgcagcgcaagtttctgggtcgtccgattgaagtttggaaactgtatttcacccatccgcaagatgtcccggcaatccgcgacaaaattcgtgcacacccggctgtgatcgatatttatgaatacgacatcccgtttgcgaaacgttatctgatcgataagggcctgattccgatggaaggtgacgaagaactgaccatgctggcctttgatattgaaacgctgtatcacgaaggcgaagaattcggcaccggtccgatcctgatgatttcatacgcagatggttcggaagctcgcgtgatcacctggaaaaagattgatctgccgtatgttgacgtcgtgagcacggaaaaagaaatgatcaagcgctttctgcgtattgtgaaagaaaaggatccggacgttctgattacctataacggcgataattttgacttcgcatacctgaaaaagcgttgcgaaaaactgggtatcaagttcacgctgggccgcgacggttctgaaccgaaaattcagcgcatgggcgatcgttttgcggttgaagtcaaaggtcgtatccatttcgatctgtatccggttatccgtcgcaccattaacctgccgacctatacgctggaagcggtttacgaagccgtctttggcaaaccgaaggaaaaagtgtacgcggaagaaattgcacaggcttgggaatcaggcgaaggtctggaacgcgtggcccgttattcgatggaagatgcaaaagttacctacgaactgggtcgcgaatttttcccgatggaagcccagctgagccgtctgatcggccaaagcctgtgggatgtttctcgcagctctacgggtaacctggtcgaatggtttctgctgcgtaaagcgtatgaacgcaacgaactggcaccgaataaaccggatgaacgtgaatatgaacgtcgcctgcgcgaatcttatgccggcggttacgttaaggaaccggaaaaaggcctgtgggaaggtctggtgtctctggattttcgctcactgtacccgtcgattatcattacgcataacgtgtccccggacaccctgaatcgtgaaggctgcatggaatatgatgttgctccggaagtcaaacacaagttttgtaaagactttccgggtttcattccgtcactgctgaaacgtctgctggatgaacgccaggaaatcaaacgtcgcatgaaagcctcgaaggatccgattgaaaagaaaatgctggactatcgtcaacgcgcaatcaaaattctggctaatagctattacggctattacggttatgcgaaggcccgctggtactgcaaagaatgtgcggaatctgtcacggcctggggccgtgaatatatcgaatttgtgcgcaaagaactggaagaaaagttcggtttcaaggttctgtacattgatacggacggcctgtacgcaaccatcccgggtgctaaaccggaagaaattaagcgtaaggccctggaatttgtggaatacatcaacgcaaaactgccgggcctgctggaactggaatatgaaggcttctacgttcgcggctttttcgtcacgaagaaaaagtatgcgctgattgacgaagaaggcaaaatcattacccgtggtctggaaatcgttcgtcgcgattggagtgaaattgccaaagaaacccaggcacgtgtgctggaagctctgctgaaagatggcaatgttgaagaagcggtttccattgtcaaagaagtgacggaaaagctgggtaaatatgaagtcccgccggaaaaactggtgatccatgaacaaattacccgcgaactgaaggattacaaagcgacgggcccgcacgttgctatcgcgaaacgtctggcagcgcgtggcgtgaagattcgtccgggtaccgttatcagctatattgtcctgaaaggctctggtcgtatcggtgaccgcgcgattccgtttgatgaattcgacccgacgaaacatcgctacgatgcagaatattacatcgaaaaccaggttctgccggctgtcgaacgtattctgaaagcgtttggctatcgtgccgaagatctgcgctaccagaaaacccgtcaagtgggcctgggtgtttggctgcaaccgaaaggtaagaaataa

SEQ ID NO: 55 - DNA, 2328 bp, Artificial Sequence
  Synthetic
atgattctggatacggactatattacggaaaatggcaagccggttattcgtgtgttcaaaaaggaaaatggcgaattcaagatcgaatatgatcgtacctttgaaccgtatttctacgctctgctgaaagatgacagcgcgatcgaagatgtcaaaaaggtgaccgccaaacgccatggcacggtggttcgcgtcaagcgtgcagaaaaagtgcagcgcaagtttctgggtcgtccgattgaagtttggaaactgtatttcacccatccgcaagatgtcccggcaatccgcgacaaaattcgtgcacacccggctgtgatcgatatttatgaatacgacatcccgtttgcgaaacgttatctgatcgataagggcctgattccgatggaaggtgacgaagaactgaccatgctggcctttgatattgaaacgctgtatcacgaaggcgaagaattcggcaccggtccgatcctgatgatttcatacgcagatggttcggaagctcgcgtgatcacctggaaaaagattgatctgccgtatgttgacgtcgtgagcacggaaaaagaaatgatcaagcgctttctgcgtattgtgaaagaaaaggatccggacgttctgattacctataacggcgataattttgacttcgcatacctgaaaaagcgttgcgaaaaactgggtatcaagttcacgctgggccgcgacggttctgaaccgaaaattcagcgcatgggcgatcgttttgcggttgaagtcaaaggtcgtatccatttcgatctgtatccggttatccgtcgcaccattaacctgccgacctatacgctggaagcggtttacgaagccgtctttggcaaaccgaaggaaaaagtgtacgcggaagaaattgcacaggcttgggaatcaggcgaaggtctggaacgcgtggcccgttattcgatggaagatgcaaaagttacctacgaactgggtcgcgaatttttcccgatggaagcccagctgagccgtctgatcggccaaagcctgtgggatgtttctcgcagctctacgggtaacctggtcgaatggtttctgctgcgtaaagcgtatgaacgcaacgaactggcaccgaataaaccggatgaacgtgaatatgaacgtcgcctgcgcgaatcttatgccggcggttacgttaaggaaccggaaaaaggcctgtgggaaggtctggtgtctctggattttcgctcactgtacccgtcgattatcattacgcataacgtgtccccggacaccctgaatcgtgaaggctgcatggaatatgatgttgctccggaagtcaaacacaagttttgtaaagactttccgggtttcattccgtcactgctgaaacgtctgctggatgaacgccaggaaatcaaacgtcgcatgaaagcctcgaaggatccgattgaaaagaaaatgctggactatcgtcaacgcgcaatcaaaattctggctaatagctattacggctattacggttatgcgaaggcccgctggtactgcaaagaatgtgcggaatctgtcacggcctggggccgtgaatatatcgaatttgtgcgcaaagaactggaagaaaagttcggtttcaaggttctgtacattgatacggacggcctgtacgcaaccatcccgggtgctaaaccggaagaaattaagcgtaaggccctggaatttgtggaatacatcaacgcaaaactgccgggcctgctggaactggaatatgaaggcttctacgttcgcggctttttcgtcacgaagaaaaagtatgcgctgattgacgaagaaggcaaaatcattacccgtggtctggaaatcgttcgtcgcgattggagtgaaattgccaaagaaacccaggcaaaggttctggaagcaattctgaaacatggtaacgtcgaagaagcggtcaagatcgtgaaagaagttaccgaaaaactgtcgaattatgaaattccggtcgaaaagctggtgatctacgaacaaattacgcgcccgctgaacgaatataaagccattggcccgcacgtggcagttgctaaacgtctggcggccaagggtatcaagattaaaccgggcatggtgattggttatgttgtcctgcgcggcgatggtccgatcagcaaacgtgcgatcgccatcgaagaattcgatggcaaaaagcataagtacgacgcagaatactacatcgaaaatcaggttctgccggccgtcgaacgtatcctgaaagcattcggttataagcgtgaagatctgcgctggcagaagaccaaacaagtgggcctgggtgcgtggctgaaagttaaaaagtcttaa

SEQ ID NO: 56 - DNA, 2331 bp, Artificial Sequence
  Synthetic
atgattctggatacggactatattacggaaaatggcaagccggttattcgtgtgttcaaaaaggaaaatggcgaattcaagatcgaatatgatcgtacctttgaaccgtatttctacgctctgctgaaagatgacagcgcgatcgaagatgtcaaaaaggtgaccgccaaacgccatggcacggtggttcgcgtcaagcgtgcagaaaaagtgcagcgcaagtttctgggtcgtccgattgaagtttggaaactgtatttcacccatccgcaagatgtcccggcaatccgcgacaaaattcgtgcacacccggctgtgatcgatatttatgaatacgacatcccgtttgcgaaacgttatctgatcgataagggcctgattccgatggaaggtgacgaagaactgaccatgctggcctttgatattgaaacgctgtatcacgaaggcgaagaattcggcaccggtccgatcctgatgatttcatacgcagatggttcggaagctcgcgtgatcacctggaaaaagattgatctgccgtatgttgacgtcgtgagcacggaaaaagaaatgatcaagcgctttctgcgtattgtgaaagaaaaggatccggacgttctgattacctataacggcgataattttgacttcgcatacctgaaaaagcgttgcgaaaaactgggtatcaagttcacgctgggccgcgacggttctgaaccgaaaattcagcgcatgggcgatcgttttgcggttgaagtcaaaggtcgtatccatttcgatctgtatccggttatccgtcgcaccattaacctgccgacctatacgctggaagcggtttacgaagccgtctttggcaaaccgaaggaaaaagtgtacgcggaagaaattgcacaggcttgggaatcaggcgaaggtctggaacgcgtggcccgttattcgatggaagatgcaaaagttacctacgaactgggtcgcgaatttttcccgatggaagcccagctgagccgtctgatcggccaaagcctgtgggatgtttctcgcagctctacgggtaacctggtcgaatggtttctgctgcgtaaagcgtatgaacgcaacgaactggcaccgaataaaccggatgaacgtgaatatgaacgtcgcctgcgcgaatcttatgccggcggttacgttaaggaaccggaaaaaggcctgtgggaaggtctggtgtctctggattttcgctcactgtacccgtcgattatcattacgcataacgtgtccccggacaccctgaatcgtgaaggctgcatggaatatgatgttgctccggaagtcaaacacaagttttgtaaagactttccgggtttcattccgtcactgctgaaacgtctgctggatgaacgccaggaaatcaaacgtcgcatgaaagcctcgaaggatccgattgaaaagaaaatgctggactatcgtcaacgcgcaatcaaaattctggctaatagctattacggctattacggttatgcgaaggcccgctggtactgcaaagaatgtgcggaatctgtcacggcctggggccgtgaatatatcgaatttgtgcgcaaagaactggaagaaaagttcggtttcaaggttctgtacattgatacggacggcctgtacgcaaccatcccgggtgctaaaccggaagaaattaagcgtaaggccctggaatttgtggaatacatcaacgcaaaactgccgggcctgctggaactggaatatgaaggcttctacgttcgcggctttttcgtcacgaagaaaaagtatgcgctgattgacgaagaaggcaaaatcattacccgtggtctggaaatcgttcgtcgcgattggagtgaaattgccaaagaaacccaggcacgtgttctggaagcactgctgaaagatggtaatgtcgaagaagcagtgagtattgttaaagaagtcacggaaaaactgtccaagtatgaagtcccgccggaaaaactggtgattcatgaacaaatcacccgcgaactgaaagattacaaggcgacgggcccgcacgtggcaattgctaaacgtctggcagcgcgtggcgttaagatccgtccgggtaccgttattagctatatcgtcctgaaaggctctggtcgtattggtgaccgcgccatcccgtttgatgaattcgacccggctaaacaccgctacgatgcggaatattacattgaaaatcaggtcctgccggctgtggaacgtatcctgaaagcgtttggctatcgtaaggaagatctgcgctaccagaaaacccgtcaagtgggcctgggtgcgtggctgaaaccgaagggtaaaaagtaa

SEQ ID NO: 57 - DNA, 2331 bp, Artificial Sequence
  Synthetic
atgattctggatacggactatattacggaaaatggcaagccggttattcgtgtgttcaaaaaggaaaatggcgaattcaagatcgaatatgatcgtacctttgaaccgtatttctacgctctgctgaaagatgacagcgcgatcgaagatgtcaaaaaggtgaccgccaaacgccatggcacggtggttcgcgtcaagcgtgcagaaaaagtgcagcgcaagtttctgggtcgtccgattgaagtttggaaactgtatttcacccatccgcaagatgtcccggcaatccgcgacaaaattcgtgcacacccggctgtgatcgatatttatgaatacgacatcccgtttgcgaaacgttatctgatcgataagggcctgattccgatggaaggtgacgaagaactgaccatgctggcctttgatattgaaacgctgtatcacgaaggcgaagaattcggcaccggtccgatcctgatgatttcatacgcagatggttcggaagctcgcgtgatcacctggaaaaagattgatctgccgtatgttgacgtcgtgagcacggaaaaagaaatgatcaagcgctttctgcgtattgtgaaagaaaaggatccggacgttctgattacctataacggcgataattttgacttcgcatacctgaaaaagcgttgcgaaaaactgggtatcaagttcacgctgggccgcgacggttctgaaccgaaaattcagcgcatgggcgatcgttttgcggttgaagtcaaaggtcgtatccatttcgatctgtatccggttatccgtcgcaccattaacctgccgacctatacgctggaagcggtttacgaagccgtctttggcaaaccgaaggaaaaagtgtacgcggaagaaattgcacaggcttgggaatcaggcgaaggtctggaacgcgtggcccgttattcgatggaagatgcaaaagttacctacgaactgggtcgcgaatttttcccgatggaagcccagctgagccgtctgatcggccaaagcctgtgggatgtttctcgcagctctacgggtaacctggtcgaatggtttctgctgcgtaaagcgtatgaacgcaacgaactggcaccgaataaaccggatgaacgtgaatatgaacgtcgcctgcgcgaatcttatgccggcggttacgttaaggaaccggaaaaaggcctgtgggaaggtctggtgtctctggattttcgctcactgtacccgtcgattatcattacgcataacgtgtccccggacaccctgaatcgtgaaggctgcatggaatatgatgttgctccggaagtcaaacacaagttttgtaaagactttccgggtttcattccgtcactgctgaaacgtctgctggatgaacgccaggaaatcaaacgtcgcatgaaagcctcgaaggatccgattgaaaagaaaatgctggactatcgtcaacgcgcaatcaaaattctggctaatagctattacggctattacggttatgcgaaggcccgctggtactgcaaagaatgtgcggaatctgtcacggcctggggccgtgaatatatcgaatttgtgcgcaaagaactggaagaaaagttcggtttcaaggttctgtacattgatacggacggcctgtacgcaaccatcccgggtgctaaaccggaagaaattaagcgtaaggccctggaatttgtggaatacatcaacgcaaaactgccgggcctgctggaactggaatatgaaggcttctacgttcgcggctttttcgtcacgaagaaaaagtatgcgctgattgacgaagaaggcaaaatcattacccgtggtctggaaatcgttcgtcgcgattggagtgaaattgccaaagaaacccaggcacgcgtcctggaagcaatcctgaaagatggtgacgtggaagaagccgtccgtattgtgaaagaagttacggaaaaactgtccaaatatgaagttccgccggaaaaactggtcatccatgaacaaattacccgcgaactgaaagattacaaagcgacgggcccgcacgtcgcaatcgctaaacgtctggcggcgcgtggcgtgaaaattcgtccgggtaccgtgatctcatatattgttctgaaaggctcgggtcgtatcggtgaccgcgctattccgtttgatgaattcgacccgaaaaaacacaaatacgatgcggaatactacatcgaaaaccaggttctgccggccgtcgaacgtattctgcgcgcatttggctaccgtaaagaagatctgcgttatcaaaaaaccaaacaagtgggtctgggtgcgtggctgaaaccgaaaggtaaaaaataa

SEQ ID NO: 58 - DNA, 2328 bp, Artificial Sequence
  Synthetic
atgattctggatacggactatattacggaaaatggcaagccggttattcgtgtgttcaaaaaggaaaatggcgaattcaagatcgaatatgatcgtacctttgaaccgtatttctacgctctgctgaaagatgacagcgcgatcgaagatgtcaaaaaggtgaccgccaaacgccatggcacggtggttcgcgtcaagcgtgcagaaaaagtgcagcgcaagtttctgggtcgtccgattgaagtttggaaactgtatttcacccatccgcaagatgtcccggcaatccgcgacaaaattcgtgcacacccggctgtgatcgatatttatgaatacgacatcccgtttgcgaaacgttatctgatcgataagggcctgattccgatggaaggtgacgaagaactgaccatgctggcctttgatattgaaacgctgtatcacgaaggcgaagaattcggcaccggtccgatcctgatgatttcatacgcagatggttcggaagctcgcgtgatcacctggaaaaagattgatctgccgtatgttgacgtcgtgagcacggaaaaagaaatgatcaagcgctttctgcgtattgtgaaagaaaaggatccggacgttctgattacctataacggcgataattttgacttcgcatacctgaaaaagcgttgcgaaaaactgggtatcaagttcacgctgggccgcgacggttctgaaccgaaaattcagcgcatgggcgatcgttttgcggttgaagtcaaaggtcgtatccatttcgatctgtatccggttatccgtcgcaccattaacctgccgacctatacgctggaagcggtttacgaagccgtctttggcaaaccgaaggaaaaagtgtacgcggaagaaattgcacaggcttgggaatcaggcgaaggtctggaacgcgtggcccgttattcgatggaagatgcaaaagttacctacgaactgggtcgcgaatttttcccgatggaagcccagctgagccgtctgatcggccaaagcctgtgggatgtttctcgcagctctacgggtaacctggtcgaatggtttctgctgcgtaaagcgtatgaacgcaacgaactggcaccgaataaaccggatgaacgtgaatatgaacgtcgcctgcgcgaatcttatgccggcggttacgttaaggaaccggaaaaaggcctgtgggaaggtctggtgtctctggattttcgctcactgtacccgtcgattatcattacgcataacgtgtccccggacaccctgaatcgtgaaggctgcatggaatatgatgttgctccggaagtcaaacacaagttttgtaaagactttccgggtttcattccgtcactgctgaaacgtctgctggatgaacgccaggaaatcaaacgtcgcatgaaagcctcgaaggatccgattgaaaagaaaatgctggactatcgtcaacgcgcaatcaaaattctggctaatagctattacggctattacggttatgcgaaggcccgctggtactgcaaagaatgtgcggaatctgtcacggcctggggccgtgaatatatcgaatttgtgcgcaaagaactggaagaaaagttcggtttcaaggttctgtacattgatacggacggcctgtacgcaaccatcccgggtgctaaaccggaagaaattaagcgtaaggccctggaatttgtggaatacatcaacgcaaaactgccgggcctgctggaactggaatatgaaggcttctacgttcgcggctttttcgtcacgaagaaaaagtatgcgctgattgacgaagaaggcaaaatcattacccgtggtctggaaatcgttcgtcgcgattggagtgaaattgccaaagaaacccaggcacgtgttctggaagcaattctgaaacatggtaacgtcgaagaagcggtcaaaatcgtgaaagaagttacggaaaaactgtctaactacgaaattccgccggaaaaactggccatctacgaacaaattacccgcccgctgcatgaatataaagcaatcggtccgcacgtcgcagtggcaaaacgtctggcagcacgcggcgttaaagtcaaaccgggtatggtcatcggctatattgtgctgcgtggtgatggcccgatcagcaaccgcgcaattctggctgaagaatacgatctgaaaaaacacaaatacgacgccgaatattacatcgaaaatcaggttctgccggctgtcctgcgtattctggaagcgtttggctatcgtaaagaagatctgcgctggcagaaaacccgtcaaacgggtctgacctcatggctgaatattaaaaaatcgtaa

SEQ ID NO: 59 - DNA, 2328 bp, Artificial Sequence
  Synthetic
atgattctggatacggactatattacggaaaatggcaagccggttattcgtgtgttcaaaaaggaaaatggcgaattcaagatcgaatatgatcgtacctttgaaccgtatttctacgctctgctgaaagatgacagcgcgatcgaagatgtcaaaaaggtgaccgccaaacgccatggcacggtggttcgcgtcaagcgtgcagaaaaagtgcagcgcaagtttctgggtcgtccgattgaagtttggaaactgtatttcacccatccgcaagatgtcccggcaatccgcgacaaaattcgtgcacacccggctgtgatcgatatttatgaatacgacatcccgtttgcgaaacgttatctgatcgataagggcctgattccgatggaaggtgacgaagaactgaccatgctggcctttgatattgaaacgctgtatcacgaaggcgaagaattcggcaccggtccgatcctgatgatttcatacgcagatggttcggaagctcgcgtgatcacctggaaaaagattgatctgccgtatgttgacgtcgtgagcacggaaaaagaaatgatcaagcgctttctgcgtattgtgaaagaaaaggatccggacgttctgattacctataacggcgataattttgacttcgcatacctgaaaaagcgttgcgaaaaactgggtatcaagttcacgctgggccgcgacggttctgaaccgaaaattcagcgcatgggcgatcgttttgcggttgaagtcaaaggtcgtatccatttcgatctgtatccggttatccgtcgcaccattaacctgccgacctatacgctggaagcggtttacgaagccgtctttggcaaaccgaaggaaaaagtgtacgcggaagaaattgcacaggcttgggaatcaggcgaaggtctggaacgcgtggcccgttattcgatggaagatgcaaaagttacctacgaactgggtcgcgaatttttcccgatggaagcccagctgagccgtctgatcggccaaagcctgtgggatgtttctcgcagctctacgggtaacctggtcgaatggtttctgctgcgtaaagcgtatgaacgcaacgaactggcaccgaataaaccggatgaacgtgaatatgaacgtcgcctgcgcgaatcttatgccggcggttacgttaaggaaccggaaaaaggcctgtgggaaggtctggtgtctctggattttcgctcactgtacccgtcgattatcattacgcataacgtgtccccggacaccctgaatcgtgaaggctgcatggaatatgatgttgctccggaagtcaaacacaagttttgtaaagactttccgggtttcattccgtcactgctgaaacgtctgctggatgaacgccaggaaatcaaacgtcgcatgaaagcctcgaaggatccgattgaaaagaaaatgctggactatcgtcaacgcgcaatcaaaattctggctaatagctattacggctattacggttatgcgaaggcccgctggtactgcaaagaatgtgcggaatctgtcacggcctggggccgtgaatatatcgaatttgtgcgcaaagaactggaagaaaagttcggtttcaaggttctgtacattgatacggacggcctgtacgcaaccatcccgggtgctaaaccggaagaaattaagcgtaaggccctggaatttgtggaatacatcaacgcaaaactgccgggcctgctggaactggaatatgaaggcttctacgttcgcggctttttcgtcacgaagaaaaagtatgcgctgattgacgaagaaggcaaaatcattacccgtggtctggaaatcgttcgtcgcgattggagtgaaattgccaaagaaacccaggcaaaagttctggaagcaatcctgaaacatggtaatgtcgaagaagcagtgaaaattgtcaaggaagtgacggaaaaactgtcgaagtatgaaatcccgccggaaaaactggtgatctacgaacaaattacccgcccgctgcatgaatataaagcgattggcccgcacgtggcagttgctaaacgtctggcagcccgcggtgtcaaagtgcgtccgggcatggtgatcggttatattgttctgcgtggcgatggtccgatcagtaaacgcgcgattctggccgaagaatttgatccgcgcaaacacaagtacgacgccgaatattacatcgaaaaccaggtgctgccggctgttctgcgtattctggaagcgttcggctatcgtaaagaagatctgcgctggcagaaaaccaagcaaacgggtctgaccgcatggctgaatgtgaaaaagaaataa

SEQ ID NO: 60 - DNA, 2331 bp, Artificial Sequence
  Synthetic
atgattctggatacggactatattacggaaaatggcaagccggttattcgtgtgttcaaaaaggaaaatggcgaattcaagatcgaatatgatcgtacctttgaaccgtatttctacgctctgctgaaagatgacagcgcgatcgaagatgtcaaaaaggtgaccgccaaacgccatggcacggtggttcgcgtcaagcgtgcagaaaaagtgcagcgcaagtttctgggtcgtccgattgaagtttggaaactgtatttcacccatccgcaagatgtcccggcaatccgcgacaaaattcgtgcacacccggctgtgatcgatatttatgaatacgacatcccgtttgcgaaacgttatctgatcgataagggcctgattccgatggaaggtgacgaagaactgaccatgctggcctttgatattgaaacgctgtatcacgaaggcgaagaattcggcaccggtccgatcctgatgatttcatacgcagatggttcggaagctcgcgtgatcacctggaaaaagattgatctgccgtatgttgacgtcgtgagcacggaaaaagaaatgatcaagcgctttctgcgtattgtgaaagaaaaggatccggacgttctgattacctataacggcgataattttgacttcgcatacctgaaaaagcgttgcgaaaaactgggtatcaagttcacgctgggccgcgacggttctgaaccgaaaattcagcgcatgggcgatcgttttgcggttgaagtcaaaggtcgtatccatttcgatctgtatccggttatccgtcgcaccattaacctgccgacctatacgctggaagcggtttacgaagccgtctttggcaaaccgaaggaaaaagtgtacgcggaagaaattgcacaggcttgggaatcaggcgaaggtctggaacgcgtggcccgttattcgatggaagatgcaaaagttacctacgaactgggtcgcgaatttttcccgatggaagcccagctgagccgtctgatcggccaaagcctgtgggatgtttctcgcagctctacgggtaacctggtcgaatggtttctgctgcgtaaagcgtatgaacgcaacgaagtggcaccgaataaaccggatgaacgtgaatatcagcgtcgcctgcgcgaaagttatgcaggcggttacgtgaaagaaccggaaaaaggtctgtgggaaggcctggtttatctggattttcgtgcgctgtacccgagcattatcattacgcataacgtttctccggacaccctgaatcgtgaaggctgccgcgaatatgatattgcgccggaagtgggtcacaaattttgtaaagatatcccgggcttcattccgagcctgctgaaacgtctgctggaagaacgccagaaaatcaaaacgaaaatgaaagaaacccaagatccgatcgaaaaaattctgctggactaccgtcagcgcgcgatcaaaattctggccaacagttattacggttattacggctatgcaaaagctcgctggtactgcaaagaatgtgcagaatccgttaccgcttggggtcgtaaatacatcgaattcgtctggaaagaactggaagaaaaattcggtttcaaagttctgtacatcgatacggacggtctgtacgcaaccatcccgggcggtaaaccggaagaaattaagaaaaaagccctggaatttgtggattacattaatgcaaaactgccgggcctgctggaactggaatatgaaggtttctacgtgcgtggctttttcgttaccaagaaaaaatatgccgtcattgacgaagaaggtaaagtgatcacccgcggcctggaaattgttcgtcgcgattggagtgaaattgccaaagaaacccaggcacgcgttctggaagcaatcctgcgtcatggtgacgtcgaagaagccgttcgcattgtcaaagatgtgacggaaaagctgtcgaaatatgaagtcccgccggaaaaactggtgatccatgaacaaattacccgtgaactgaaggattacaaagcgacgggcccgcacgttgcaattgctaaacgcctggcagcccgtggcatcaagattcgtccgggtaccgttatcagctatattgtcctgaaaggctctggtcgcatcggtgatcgtgctattccgtttgatgaattcgacccgacgaaacaccgttacgatgccgaatattacatcgaaaatcaggtgctgccggccgttgaacgcattctgaaagcatttggctataagaaagaagaactgcgctaccagaaaacccgtcaagtgggcctgggtgcgtggctgaagctgaaaggtaagaaataa

SEQ ID NO: 61 - DNA, 2325 bp, Artificial Sequence
  Synthetic
atgattctggatacggactatattacggaaaatggcaagccggttattcgtgtgttcaaaaaggaaaatggcgaattcaagatcgaatatgatcgtacctttgaaccgtatttctacgctctgctgaaagatgacagcgcgatcgaagatgtcaaaaaggtgaccgccaaacgccatggcacggtggttcgcgtcaagcgtgcagaaaaagtgcagcgcaagtttctgggtcgtccgattgaagtttggaaactgtatttcacccatccgcaagatgtcccggcaatccgcgacaaaattcgtgcacacccggctgtgatcgatatttatgaatacgacatcccgtttgcgaaacgttatctgatcgataagggcctgattccgatggaaggtgacgaagaactgaccatgctggcctttgatattgaaacgctgtatcacgaaggcgaagaattcggcaccggtccgatcctgatgatttcatacgcagatggttcggaagctcgcgtgatcacctggaaaaagattgatctgccgtatgttgacgtcgtgagcacggaaaaagaaatgatcaagcgctttctgcgtattgtgaaagaaaaggatccggacgttctgattacctataacggcgataattttgacttcgcatacctgaaaaagcgttgcgaaaaactgggtatcaagttcacgctgggccgcgacggttctgaaccgaaaattcagcgcatgggcgatcgttttgcggttgaagtcaaaggtcgtatccatttcgatctgtatccggttatccgtcgcaccattaacctgccgacctatacgctggaagcggtttacgaagccgtctttggcaaaccgaaggaaaaagtgtacgcggaagaaattgcacaggcttgggaatcaggcgaaggtctggaacgcgtggcccgttattcgatggaagatgcaaaagttacctacgaactgggtcgcgaatttttcccgatggaagcccagctgagccgtctgatcggccaaagcctgtgggatgtttctcgcagctctacgggtaacctggtcgaatggtttctgctgcgtaaagcgtatgaacgcaacgaagtggcaccgaataaaccggatgaacgtgaatatcagcgtcgcctgcgcgaaagttatgcaggcggttacgtgaaagaaccggaaaaaggtctgtgggaaggcctggtttatctggattttcgtgcgctgtacccgagcattatcattacgcataacgtttctccggacaccctgaatcgtgaaggctgccgcgaatatgatattgcgccggaagtgggtcacaaattttgtaaagatatcccgggcttcattccgagcctgctgaaacgtctgctggaagaacgccagaaaatcaaaacgaaaatgaaagaaacccaagatccgatcgaaaaaattctgctggactaccgtcagcgcgcgatcaaaattctggccaacagttattacggttattacggctatgcaaaagctcgctggtactgcaaagaatgtgcagaatccgttaccgcttggggtcgtaaatacatcgaattcgtctggaaagaactggaagaaaaattcggtttcaaagttctgtacatcgatacggacggtctgtacgcaaccatcccgggcggtaaaccggaagaaattaagaaaaaagccctggaatttgtggattacattaatgcaaaactgccgggcctgctggaactggaatatgaaggtttctacgtgcgtggctttttcgttaccaagaaaaaatatgccgtcattgacgaagaaggtaaagtgatcacccgcggcctggaaattgttcgtcgcgattggagtgaaattgccaaagaaacccaggcacgtgtcctggaagcaatcctgaaacatggtgatgtggaagaagcggttcgcattgtcaaagaagtgacggaaaagctgtcgaaatatgaagttccgccggaaaaactggtcatccatgaacaaattacccgcgatctgcgtgactacaaagccacgggtccgcacgtggcagttgcaaaacgtctggcagcccgtggcgtgaagattcgtccgggtaccgtgatcagttatattgttctgaaaggctccggtcgcatcggtgaccgtgctattccgtttgatgaattcgacccgacgaaacaccgttacgatgccgaatattacatcgaaaatcaggtcctgccggccgtggaacgcattctgaaagcatttggttatcgcaaggaagatctgcgttaccagaagaccaaacaagtcggcctgggtgcgtggctgaaagtgaaaaagtaa

SEQ ID NO: 62 - DNA, 2331 bp, Artificial Sequence
  Synthetic
atgattctggatacggactatattacggaaaatggcaagccggttattcgtgtgttcaaaaaggaaaatggcgaattcaagatcgaatatgatcgtacctttgaaccgtatttctacgctctgctgaaagatgacagcgcgatcgaagatgtcaaaaaggtgaccgccaaacgccatggcacggtggttcgcgtcaagcgtgcagaaaaagtgcagcgcaagtttctgggtcgtccgattgaagtttggaaactgtatttcacccatccgcaagatgtcccggcaatccgcgacaaaattcgtgcacacccggctgtgatcgatatttatgaatacgacatcccgtttgcgaaacgttatctgatcgataagggcctgattccgatggaaggtgacgaagaactgaccatgctggcctttgatattgaaacgctgtatcacgaaggcgaagaattcggcaccggtccgatcctgatgatttcatacgcagatggttcggaagctcgcgtgatcacctggaaaaagattgatctgccgtatgttgacgtcgtgagcacggaaaaagaaatgatcaagcgctttctgcgtattgtgaaagaaaaggatccggacgttctgattacctataacggcgataattttgacttcgcatacctgaaaaagcgttgcgaaaaactgggtatcaagttcacgctgggccgcgacggttctgaaccgaaaattcagcgcatgggcgatcgttttgcggttgaagtcaaaggtcgtatccatttcgatctgtatccggttatccgtcgcaccattaacctgccgacctatacgctggaagcggtttacgaagccgtctttggcaaaccgaaggaaaaagtgtacgcggaagaaattgcacaggcttgggaatcaggcgaaggtctggaacgcgtggcccgttattcgatggaagatgcaaaagttacctacgaactgggtcgcgaatttttcccgatggaagcccagctgagccgtctgatcggccaaagcctgtgggatgtttctcgcagctctacgggtaacctggtcgaatggtttctgctgcgtaaagcgtatgaacgcaacgaagtggcaccgaataaaccggatgaacgtgaatatcagcgtcgcctgcgcgaaagttatgcaggcggttacgtgaaagaaccggaaaaaggtctgtgggaaggcctggtttatctggattttcgtgcgctgtacccgagcattatcattacgcataacgtttctccggacaccctgaatcgtgaaggctgccgcgaatatgatattgcgccggaagtgggtcacaaattttgtaaagatatcccgggcttcattccgagcctgctgaaacgtctgctggaagaacgccagaaaatcaaaacgaaaatgaaagaaacccaagatccgatcgaaaaaattctgctggactaccgtcagcgcgcgatcaaaattctggccaacagttattacggttattacggctatgcaaaagctcgctggtactgcaaagaatgtgcagaatccgttaccgcttggggtcgtaaatacatcgaattcgtctggaaagaactggaagaaaaattcggtttcaaagttctgtacatcgatacggacggtctgtacgcaaccatcccgggcggtaaaccggaagaaattaagaaaaaagccctggaatttgtggattacattaatgcaaaactgccgggcctgctggaactggaatatgaaggtttctacgtgcgtggctttttcgttaccaagaaaaaatatgccgtcattgacgaagaaggtaaagtgatcacccgcggcctggaaattgttcgtcgcgattggagtgaaattgccaaagaaacccaggcacgtgtgctggaagctctgctgaaagatggcaatgttgaagaagcggtttccattgtcaaagaagtgacggaaaagctgggtaaatatgaagtcccgccggaaaaactggtgatccatgaacaaattacccgcgaactgaaggattacaaagcgacgggcccgcacgttgctatcgcgaaacgtctggcagcgcgtggcgtgaagattcgtccgggtaccgttatcagctatattgtcctgaaaggctctggtcgtatcggtgaccgcgcgattccgtttgatgaattcgacccgacgaaacatcgctacgatgcagaatattacatcgaaaaccaggttctgccggctgtcgaacgtattctgaaagcgtttggctatcgtgccgaagatctgcgctaccagaaaacccgtcaagtgggcctgggtgtttggctgcaaccgaaaggtaagaaataa

SEQ ID NO: 63 - DNA, 2328 bp, Artificial Sequence
  Synthetic
atgattctggatacggactatattacggaaaatggcaagccggttattcgtgtgttcaaaaaggaaaatggcgaattcaagatcgaatatgatcgtacctttgaaccgtatttctacgctctgctgaaagatgacagcgcgatcgaagatgtcaaaaaggtgaccgccaaacgccatggcacggtggttcgcgtcaagcgtgcagaaaaagtgcagcgcaagtttctgggtcgtccgattgaagtttggaaactgtatttcacccatccgcaagatgtcccggcaatccgcgacaaaattcgtgcacacccggctgtgatcgatatttatgaatacgacatcccgtttgcgaaacgttatctgatcgataagggcctgattccgatggaaggtgacgaagaactgaccatgctggcctttgatattgaaacgctgtatcacgaaggcgaagaattcggcaccggtccgatcctgatgatttcatacgcagatggttcggaagctcgcgtgatcacctggaaaaagattgatctgccgtatgttgacgtcgtgagcacggaaaaagaaatgatcaagcgctttctgcgtattgtgaaagaaaaggatccggacgttctgattacctataacggcgataattttgacttcgcatacctgaaaaagcgttgcgaaaaactgggtatcaagttcacgctgggccgcgacggttctgaaccgaaaattcagcgcatgggcgatcgttttgcggttgaagtcaaaggtcgtatccatttcgatctgtatccggttatccgtcgcaccattaacctgccgacctatacgctggaagcggtttacgaagccgtctttggcaaaccgaaggaaaaagtgtacgcggaagaaattgcacaggcttgggaatcaggcgaaggtctggaacgcgtggcccgttattcgatggaagatgcaaaagttacctacgaactgggtcgcgaatttttcccgatggaagcccagctgagccgtctgatcggccaaagcctgtgggatgtttctcgcagctctacgggtaacctggtcgaatggtttctgctgcgtaaagcgtatgaacgcaacgaagtggcaccgaataaaccggatgaacgtgaatatcagcgtcgcctgcgcgaaagttatgcaggcggttacgtgaaagaaccggaaaaaggtctgtgggaaggcctggtttatctggattttcgtgcgctgtacccgagcattatcattacgcataacgtttctccggacaccctgaatcgtgaaggctgccgcgaatatgatattgcgccggaagtgggtcacaaattttgtaaagatatcccgggcttcattccgagcctgctgaaacgtctgctggaagaacgccagaaaatcaaaacgaaaatgaaagaaacccaagatccgatcgaaaaaattctgctggactaccgtcagcgcgcgatcaaaattctggccaacagttattacggttattacggctatgcaaaagctcgctggtactgcaaagaatgtgcagaatccgttaccgcttggggtcgtaaatacatcgaattcgtctggaaagaactggaagaaaaattcggtttcaaagttctgtacatcgatacggacggtctgtacgcaaccatcccgggcggtaaaccggaagaaattaagaaaaaagccctggaatttgtggattacattaatgcaaaactgccgggcctgctggaactggaatatgaaggtttctacgtgcgtggctttttcgttaccaagaaaaaatatgccgtcattgacgaagaaggtaaagtgatcacccgcggcctggaaattgttcgtcgcgattggagtgaaattgccaaagaaacccaggcaaaggttctggaagcaattctgaaacatggtaacgtcgaagaagcggtcaagatcgtgaaagaagttaccgaaaaactgtcgaattatgaaattccggtcgaaaagctggtgatctacgaacaaattacgcgcccgctgaacgaatataaagccattggcccgcacgtggcagttgctaaacgtctggcggccaagggtatcaagattaaaccgggcatggtgattggttatgttgtcctgcgcggcgatggtccgatcagcaaacgtgcgatcgccatcgaagaattcgatggcaaaaagcataagtacgacgcagaatactacatcgaaaatcaggttctgccggccgtcgaacgtatcctgaaagcattcggttataagcgtgaagatctgcgctggcagaagaccaaacaagtgggcctgggtgcgtggctgaaagttaaaaagtcttaa

SEQ ID NO: 64 - DNA, 2331 bp, Artificial Sequence
  Synthetic
atgattctggatacggactatattacggaaaatggcaagccggttattcgtgtgttcaaaaaggaaaatggcgaattcaagatcgaatatgatcgtacctttgaaccgtatttctacgctctgctgaaagatgacagcgcgatcgaagatgtcaaaaaggtgaccgccaaacgccatggcacggtggttcgcgtcaagcgtgcagaaaaagtgcagcgcaagtttctgggtcgtccgattgaagtttggaaactgtatttcacccatccgcaagatgtcccggcaatccgcgacaaaattcgtgcacacccggctgtgatcgatatttatgaatacgacatcccgtttgcgaaacgttatctgatcgataagggcctgattccgatggaaggtgacgaagaactgaccatgctggcctttgatattgaaacgctgtatcacgaaggcgaagaattcggcaccggtccgatcctgatgatttcatacgcagatggttcggaagctcgcgtgatcacctggaaaaagattgatctgccgtatgttgacgtcgtgagcacggaaaaagaaatgatcaagcgctttctgcgtattgtgaaagaaaaggatccggacgttctgattacctataacggcgataattttgacttcgcatacctgaaaaagcgttgcgaaaaactgggtatcaagttcacgctgggccgcgacggttctgaaccgaaaattcagcgcatgggcgatcgttttgcggttgaagtcaaaggtcgtatccatttcgatctgtatccggttatccgtcgcaccattaacctgccgacctatacgctggaagcggtttacgaagccgtctttggcaaaccgaaggaaaaagtgtacgcggaagaaattgcacaggcttgggaatcaggcgaaggtctggaacgcgtggcccgttattcgatggaagatgcaaaagttacctacgaactgggtcgcgaatttttcccgatggaagcccagctgagccgtctgatcggccaaagcctgtgggatgtttctcgcagctctacgggtaacctggtcgaatggtttctgctgcgtaaagcgtatgaacgcaacgaagtggcaccgaataaaccggatgaacgtgaatatcagcgtcgcctgcgcgaaagttatgcaggcggttacgtgaaagaaccggaaaaaggtctgtgggaaggcctggtttatctggattttcgtgcgctgtacccgagcattatcattacgcataacgtttctccggacaccctgaatcgtgaaggctgccgcgaatatgatattgcgccggaagtgggtcacaaattttgtaaagatatcccgggcttcattccgagcctgctgaaacgtctgctggaagaacgccagaaaatcaaaacgaaaatgaaagaaacccaagatccgatcgaaaaaattctgctggactaccgtcagcgcgcgatcaaaattctggccaacagttattacggttattacggctatgcaaaagctcgctggtactgcaaagaatgtgcagaatccgttaccgcttggggtcgtaaatacatcgaattcgtctggaaagaactggaagaaaaattcggtttcaaagttctgtacatcgatacggacggtctgtacgcaaccatcccgggcggtaaaccggaagaaattaagaaaaaagccctggaatttgtggattacattaatgcaaaactgccgggcctgctggaactggaatatgaaggtttctacgtgcgtggctttttcgttaccaagaaaaaatatgccgtcattgacgaagaaggtaaagtgatcacccgcggcctggaaattgttcgtcgcgattggagtgaaattgccaaagaaacccaggcacgtgttctggaagcactgctgaaagatggtaatgtcgaagaagcagtgagtattgttaaagaagtcacggaaaaactgtccaagtatgaagtcccgccggaaaaactggtgattcatgaacaaatcacccgcgaactgaaagattacaaggcgacgggcccgcacgtggcaattgctaaacgtctggcagcgcgtggcgttaagatccgtccgggtaccgttattagctatatcgtcctgaaaggctctggtcgtattggtgaccgcgccatcccgtttgatgaattcgacccggctaaacaccgctacgatgcggaatattacattgaaaatcaggtcctgccggctgtggaacgtatcctgaaagcgtttggctatcgtaaggaagatctgcgctaccagaaaacccgtcaagtgggcctgggtgcgtggctgaaaccgaagggtaaaaagtaa

SEQ ID NO: 65 - DNA, 2331 bp, Artificial Sequence
  Synthetic
atgattctggatacggactatattacggaaaatggcaagccggttattcgtgtgttcaaaaaggaaaatggcgaattcaagatcgaatatgatcgtacctttgaaccgtatttctacgctctgctgaaagatgacagcgcgatcgaagatgtcaaaaaggtgaccgccaaacgccatggcacggtggttcgcgtcaagcgtgcagaaaaagtgcagcgcaagtttctgggtcgtccgattgaagtttggaaactgtatttcacccatccgcaagatgtcccggcaatccgcgacaaaattcgtgcacacccggctgtgatcgatatttatgaatacgacatcccgtttgcgaaacgttatctgatcgataagggcctgattccgatggaaggtgacgaagaactgaccatgctggcctttgatattgaaacgctgtatcacgaaggcgaagaattcggcaccggtccgatcctgatgatttcatacgcagatggttcggaagctcgcgtgatcacctggaaaaagattgatctgccgtatgttgacgtcgtgagcacggaaaaagaaatgatcaagcgctttctgcgtattgtgaaagaaaaggatccggacgttctgattacctataacggcgataattttgacttcgcatacctgaaaaagcgttgcgaaaaactgggtatcaagttcacgctgggccgcgacggttctgaaccgaaaattcagcgcatgggcgatcgttttgcggttgaagtcaaaggtcgtatccatttcgatctgtatccggttatccgtcgcaccattaacctgccgacctatacgctggaagcggtttacgaagccgtctttggcaaaccgaaggaaaaagtgtacgcggaagaaattgcacaggcttgggaatcaggcgaaggtctggaacgcgtggcccgttattcgatggaagatgcaaaagttacctacgaactgggtcgcgaatttttcccgatggaagcccagctgagccgtctgatcggccaaagcctgtgggatgtttctcgcagctctacgggtaacctggtcgaatggtttctgctgcgtaaagcgtatgaacgcaacgaagtggcaccgaataaaccggatgaacgtgaatatcagcgtcgcctgcgcgaaagttatgcaggcggttacgtgaaagaaccggaaaaaggtctgtgggaaggcctggtttatctggattttcgtgcgctgtacccgagcattatcattacgcataacgtttctccggacaccctgaatcgtgaaggctgccgcgaatatgatattgcgccggaagtgggtcacaaattttgtaaagatatcccgggcttcattccgagcctgctgaaacgtctgctggaagaacgccagaaaatcaaaacgaaaatgaaagaaacccaagatccgatcgaaaaaattctgctggactaccgtcagcgcgcgatcaaaattctggccaacagttattacggttattacggctatgcaaaagctcgctggtactgcaaagaatgtgcagaatccgttaccgcttggggtcgtaaatacatcgaattcgtctggaaagaactggaagaaaaattcggtttcaaagttctgtacatcgatacggacggtctgtacgcaaccatcccgggcggtaaaccggaagaaattaagaaaaaagccctggaatttgtggattacattaatgcaaaactgccgggcctgctggaactggaatatgaaggtttctacgtgcgtggctttttcgttaccaagaaaaaatatgccgtcattgacgaagaaggtaaagtgatcacccgcggcctggaaattgttcgtcgcgattggagtgaaattgccaaagaaacccaggcacgcgtcctggaagcaatcctgaaagatggtgacgtggaagaagccgtccgtattgtgaaagaagttacggaaaaactgtccaaatatgaagttccgccggaaaaactggtcatccatgaacaaattacccgcgaactgaaagattacaaagcgacgggcccgcacgtcgcaatcgctaaacgtctggcggcgcgtggcgtgaaaattcgtccgggtaccgtgatctcatatattgttctgaaaggctcgggtcgtatcggtgaccgcgctattccgtttgatgaattcgacccgaaaaaacacaaatacgatgcggaatactacatcgaaaaccaggttctgccggccgtcgaacgtattctgcgcgcatttggctaccgtaaagaagatctgcgttatcaaaaaaccaaacaagtgggtctgggtgcgtggctgaaaccgaaaggtaaaaaataa

SEQ ID NO: 66 - DNA, 2328 bp, Artificial Sequence
  Synthetic
atgattctggatacggactatattacggaaaatggcaagccggttattcgtgtgttcaaaaaggaaaatggcgaattcaagatcgaatatgatcgtacctttgaaccgtatttctacgctctgctgaaagatgacagcgcgatcgaagatgtcaaaaaggtgaccgccaaacgccatggcacggtggttcgcgtcaagcgtgcagaaaaagtgcagcgcaagtttctgggtcgtccgattgaagtttggaaactgtatttcacccatccgcaagatgtcccggcaatccgcgacaaaattcgtgcacacccggctgtgatcgatatttatgaatacgacatcccgtttgcgaaacgttatctgatcgataagggcctgattccgatggaaggtgacgaagaactgaccatgctggcctttgatattgaaacgctgtatcacgaaggcgaagaattcggcaccggtccgatcctgatgatttcatacgcagatggttcggaagctcgcgtgatcacctggaaaaagattgatctgccgtatgttgacgtcgtgagcacggaaaaagaaatgatcaagcgctttctgcgtattgtgaaagaaaaggatccggacgttctgattacctataacggcgataattttgacttcgcatacctgaaaaagcgttgcgaaaaactgggtatcaagttcacgctgggccgcgacggttctgaaccgaaaattcagcgcatgggcgatcgttttgcggttgaagtcaaaggtcgtatccatttcgatctgtatccggttatccgtcgcaccattaacctgccgacctatacgctggaagcggtttacgaagccgtctttggcaaaccgaaggaaaaagtgtacgcggaagaaattgcacaggcttgggaatcaggcgaaggtctggaacgcgtggcccgttattcgatggaagatgcaaaagttacctacgaactgggtcgcgaatttttcccgatggaagcccagctgagccgtctgatcggccaaagcctgtgggatgtttctcgcagctctacgggtaacctggtcgaatggtttctgctgcgtaaagcgtatgaacgcaacgaagtggcaccgaataaaccggatgaacgtgaatatcagcgtcgcctgcgcgaaagttatgcaggcggttacgtgaaagaaccggaaaaaggtctgtgggaaggcctggtttatctggattttcgtgcgctgtacccgagcattatcattacgcataacgtttctccggacaccctgaatcgtgaaggctgccgcgaatatgatattgcgccggaagtgggtcacaaattttgtaaagatatcccgggcttcattccgagcctgctgaaacgtctgctggaagaacgccagaaaatcaaaacgaaaatgaaagaaacccaagatccgatcgaaaaaattctgctggactaccgtcagcgcgcgatcaaaattctggccaacagttattacggttattacggctatgcaaaagctcgctggtactgcaaagaatgtgcagaatccgttaccgcttggggtcgtaaatacatcgaattcgtctggaaagaactggaagaaaaattcggtttcaaagttctgtacatcgatacggacggtctgtacgcaaccatcccgggcggtaaaccggaagaaattaagaaaaaagccctggaatttgtggattacattaatgcaaaactgccgggcctgctggaactggaatatgaaggtttctacgtgcgtggctttttcgttaccaagaaaaaatatgccgtcattgacgaagaaggtaaagtgatcacccgcggcctggaaattgttcgtcgcgattggagtgaaattgccaaagaaacccaggcacgtgttctggaagcaattctgaaacatggtaacgtcgaagaagcggtcaaaatcgtgaaagaagttacggaaaaactgtctaactacgaaattccgccggaaaaactggccatctacgaacaaattacccgcccgctgcatgaatataaagcaatcggtccgcacgtcgcagtggcaaaacgtctggcagcacgcggcgttaaagtcaaaccgggtatggtcatcggctatattgtgctgcgtggtgatggcccgatcagcaaccgcgcaattctggctgaagaatacgatctgaaaaaacacaaatacgacgccgaatattacatcgaaaatcaggttctgccggctgtcctgcgtattctggaagcgtttggctatcgtaaagaagatctgcgctggcagaaaacccgtcaaacgggtctgacctcatggctgaatattaaaaaatcgtaa

SEQ ID NO: 67 - DNA, 2328 bp, Artificial Sequence
  Synthetic
atgattctggatacggactatattacggaaaatggcaagccggttattcgtgtgttcaaaaaggaaaatggcgaattcaagatcgaatatgatcgtacctttgaaccgtatttctacgctctgctgaaagatgacagcgcgatcgaagatgtcaaaaaggtgaccgccaaacgccatggcacggtggttcgcgtcaagcgtgcagaaaaagtgcagcgcaagtttctgggtcgtccgattgaagtttggaaactgtatttcacccatccgcaagatgtcccggcaatccgcgacaaaattcgtgcacacccggctgtgatcgatatttatgaatacgacatcccgtttgcgaaacgttatctgatcgataagggcctgattccgatggaaggtgacgaagaactgaccatgctggcctttgatattgaaacgctgtatcacgaaggcgaagaattcggcaccggtccgatcctgatgatttcatacgcagatggttcggaagctcgcgtgatcacctggaaaaagattgatctgccgtatgttgacgtcgtgagcacggaaaaagaaatgatcaagcgctttctgcgtattgtgaaagaaaaggatccggacgttctgattacctataacggcgataattttgacttcgcatacctgaaaaagcgttgcgaaaaactgggtatcaagttcacgctgggccgcgacggttctgaaccgaaaattcagcgcatgggcgatcgttttgcggttgaagtcaaaggtcgtatccatttcgatctgtatccggttatccgtcgcaccattaacctgccgacctatacgctggaagcggtttacgaagccgtctttggcaaaccgaaggaaaaagtgtacgcggaagaaattgcacaggcttgggaatcaggcgaaggtctggaacgcgtggcccgttattcgatggaagatgcaaaagttacctacgaactgggtcgcgaatttttcccgatggaagcccagctgagccgtctgatcggccaaagcctgtgggatgtttctcgcagctctacgggtaacctggtcgaatggtttctgctgcgtaaagcgtatgaacgcaacgaagtggcaccgaataaaccggatgaacgtgaatatcagcgtcgcctgcgcgaaagttatgcaggcggttacgtgaaagaaccggaaaaaggtctgtgggaaggcctggtttatctggattttcgtgcgctgtacccgagcattatcattacgcataacgtttctccggacaccctgaatcgtgaaggctgccgcgaatatgatattgcgccggaagtgggtcacaaattttgtaaagatatcccgggcttcattccgagcctgctgaaacgtctgctggaagaacgccagaaaatcaaaacgaaaatgaaagaaacccaagatccgatcgaaaaaattctgctggactaccgtcagcgcgcgatcaaaattctggccaacagttattacggttattacggctatgcaaaagctcgctggtactgcaaagaatgtgcagaatccgttaccgcttggggtcgtaaatacatcgaattcgtctggaaagaactggaagaaaaattcggtttcaaagttctgtacatcgatacggacggtctgtacgcaaccatcccgggcggtaaaccggaagaaattaagaaaaaagccctggaatttgtggattacattaatgcaaaactgccgggcctgctggaactggaatatgaaggtttctacgtgcgtggctttttcgttaccaagaaaaaatatgccgtcattgacgaagaaggtaaagtgatcacccgcggcctggaaattgttcgtcgcgattggagtgaaattgccaaagaaacccaggcaaaagttctggaagcaatcctgaaacatggtaatgtcgaagaagcagtgaaaattgtcaaggaagtgacggaaaaactgtcgaagtatgaaatcccgccggaaaaactggtgatctacgaacaaattacccgcccgctgcatgaatataaagcgattggcccgcacgtggcagttgctaaacgtctggcagcccgcggtgtcaaagtgcgtccgggcatggtgatcggttatattgttctgcgtggcgatggtccgatcagtaaacgcgcgattctggccgaagaatttgatccgcgcaaacacaagtacgacgccgaatattacatcgaaaaccaggtgctgccggctgttctgcgtattctggaagcgttcggctatcgtaaagaagatctgcgctggcagaaaaccaagcaaacgggtctgaccgcatggctgaatgtgaaaaagaaataa

SEQ ID NO: 68 - DNA, 2328 bp, Artificial Sequence
  Synthetic
atgattctggatacggactatattacggaaaatggcaagccggttattcgtgtgttcaaaaaggaaaatggcgaattcaagatcgaatatgatcgtacctttgaaccgtatttctacgctctgctgaaagatgacagcgcgatcgaagatgtcaaaaaggtgaccgccaaacgccatggcacggtggttcgcgtcaagcgtgcagaaaaagtgcagcgcaagtttctgggtcgtccgattgaagtttggaaactgtatttcacccatccgcaagatgtcccggcaatccgcgacaaaattcgtgcacacccggctgtgatcgatatttatgaatacgacatcccgtttgcgaaacgttatctgatcgataagggcctgattccgatggaaggtgacgaagaactgaccatgctggcctttgatattgaaacgctgtatcacgaaggcgaagaattcggcaccggtccgatcctgatgatttcatacgcagatggttcggaagctcgcgtgatcacctggaaaaagattgatctgccgtatgttgacgtcgtgagcacggaaaaagaaatgatcaagcgctttctgcgtattgtgaaagaaaaggatccggacgttctgattacctataacggcgataattttgacttcgcatacctgaaaaagcgttgcgaaaaactgggtatcaagttcacgctgggccgcgacggttctgaaccgaaaattcagcgcatgggcgatcgttttgcggttgaagtcaaaggtcgtatccatttcgatctgtatccggttatccgtcgcaccattaacctgccgacctatacgctggaagcggtttacgaagccgtctttggcaaaccgaaggaaaaagtgtacgcggaagaaattgcacaggcttgggaatcaggcgaaggtctggaacgcgtggcccgttattcgatggaagatgcaaaagttacctacgaactgggtcgcgaatttttcccgatggaagcccagctgagccgtctgatcggccaaagcctgtgggatgtttctcgcagctctacgggtaacctggtcgaatggtttctgctgcgtaaagcgtatgaacgcaacgaactggcgccgaataaaccggatgaaaaggaactggcacgtcgccgtggcggttatgcaggcggttacgtcaaagaaccggaacgtggcctgtgggataatattgtgtatctggactttcgcagtctgtacccgtccattatcattacccataacgttagtccggacacgctgaatcgcgaaggctgcaaagaatatgatgtggccccggaagttggtcacaagttctgtaaagactttccgggcttcatcccgtccctgctgggtgatctgctggaagaacgccagaagattaagcgtaagatgaaagcaaccgttgatccgctggaaaagaaactgctggactatcgccaacgtgcgatcaaaattctggccaacagctattacggctattacggttatgcgaaagcccgctggtactgccgtgaatgtgcagaatctgtgaccgcttggggccgcgaatatattgaaaccacgatccgtgaaatcgaagaaaagttcggtttcaaggttctgtacgctgataccgacggctttttcgcgacgatcccgggtgcagatgctgaaaccgtgaaaaagaaagctaaggaattcctgaagtacatcaacgcgaaactgccgggcctgctggaactggaatatgaaggcttctacgttcgtggctttttcgtcacgaagaaaaagtacgcggttatcgacgaagaaggcaaaattaccacgcgcggtctggaaatcgtgcgccgtgattggagtgaaattgccaaagaaacccaggcacgcgttctggaagcaatcctgcgtcatggtgacgtcgaagaagccgttcgcattgtcaaagatgtgacggaaaagctgtcgaaatatgaagtcccgccggaaaaactggtgatccatgaacaaattacccgtgaactgaaggattacaaagcgacgggcccgcacgttgcaattgctaaacgcctggcagcccgtggcatcaagattcgtccgggtaccgttatcagctatattgtcctgaaaggctctggtcgcatcggtgatcgtgctattccgtttgatgaattcgacccgacgaaacaccgttacgatgccgaatattacatcgaaaatcaggtgctgccggccgttgaacgcattctgaaagcatttggctataagaaagaagaactgcgctaccagaaaacccgtcaagtgggcctgggtgcgtggctgaagctgaaaggtaagaaataa

SEQ ID NO: 69 - DNA, 2322 bp, Artificial Sequence
  Synthetic
atgattctggatacggactatattacggaaaatggcaagccggttattcgtgtgttcaaaaaggaaaatggcgaattcaagatcgaatatgatcgtacctttgaaccgtatttctacgctctgctgaaagatgacagcgcgatcgaagatgtcaaaaaggtgaccgccaaacgccatggcacggtggttcgcgtcaagcgtgcagaaaaagtgcagcgcaagtttctgggtcgtccgattgaagtttggaaactgtatttcacccatccgcaagatgtcccggcaatccgcgacaaaattcgtgcacacccggctgtgatcgatatttatgaatacgacatcccgtttgcgaaacgttatctgatcgataagggcctgattccgatggaaggtgacgaagaactgaccatgctggcctttgatattgaaacgctgtatcacgaaggcgaagaattcggcaccggtccgatcctgatgatttcatacgcagatggttcggaagctcgcgtgatcacctggaaaaagattgatctgccgtatgttgacgtcgtgagcacggaaaaagaaatgatcaagcgctttctgcgtattgtgaaagaaaaggatccggacgttctgattacctataacggcgataattttgacttcgcatacctgaaaaagcgttgcgaaaaactgggtatcaagttcacgctgggccgcgacggttctgaaccgaaaattcagcgcatgggcgatcgttttgcggttgaagtcaaaggtcgtatccatttcgatctgtatccggttatccgtcgcaccattaacctgccgacctatacgctggaagcggtttacgaagccgtctttggcaaaccgaaggaaaaagtgtacgcggaagaaattgcacaggcttgggaatcaggcgaaggtctggaacgcgtggcccgttattcgatggaagatgcaaaagttacctacgaactgggtcgcgaatttttcccgatggaagcccagctgagccgtctgatcggccaaagcctgtgggatgtttctcgcagctctacgggtaacctggtcgaatggtttctgctgcgtaaagcgtatgaacgcaacgaactggcgccgaataaaccggatgaaaaggaactggcacgtcgccgtggcggttatgcaggcggttacgtcaaagaaccggaacgtggcctgtgggataatattgtgtatctggactttcgcagtctgtacccgtccattatcattacccataacgttagtccggacacgctgaatcgcgaaggctgcaaagaatatgatgtggccccggaagttggtcacaagttctgtaaagactttccgggcttcatcccgtccctgctgggtgatctgctggaagaacgccagaagattaagcgtaagatgaaagcaaccgttgatccgctggaaaagaaactgctggactatcgccaacgtgcgatcaaaattctggccaacagctattacggctattacggttatgcgaaagcccgctggtactgccgtgaatgtgcagaatctgtgaccgcttggggccgcgaatatattgaaaccacgatccgtgaaatcgaagaaaagttcggtttcaaggttctgtacgctgataccgacggctttttcgcgacgatcccgggtgcagatgctgaaaccgtgaaaaagaaagctaaggaattcctgaagtacatcaacgcgaaactgccgggcctgctggaactggaatatgaaggcttctacgttcgtggctttttcgtcacgaagaaaaagtacgcggttatcgacgaagaaggcaaaattaccacgcgcggtctggaaatcgtgcgccgtgattggagtgaaattgccaaagaaacccaggcacgtgtcctggaagcaatcctgaaacatggtgatgtggaagaagcggttcgcattgtcaaagaagtgacggaaaagctgtcgaaatatgaagttccgccggaaaaactggtcatccatgaacaaattacccgcgatctgcgtgactacaaagccacgggtccgcacgtggcagttgcaaaacgtctggcagcccgtggcgtgaagattcgtccgggtaccgtgatcagttatattgttctgaaaggctccggtcgcatcggtgaccgtgctattccgtttgatgaattcgacccgacgaaacaccgttacgatgccgaatattacatcgaaaatcaggtcctgccggccgtggaacgcattctgaaagcatttggttatcgcaaggaagatctgcgttaccagaagaccaaacaagtcggcctgggtgcgtggctgaaagtgaaaaagtaa

SEQ ID NO: 70 - DNA, 2328 bp, Artificial Sequence
  Synthetic
atgattctggatacggactatattacggaaaatggcaagccggttattcgtgtgttcaaaaaggaaaatggcgaattcaagatcgaatatgatcgtacctttgaaccgtatttctacgctctgctgaaagatgacagcgcgatcgaagatgtcaaaaaggtgaccgccaaacgccatggcacggtggttcgcgtcaagcgtgcagaaaaagtgcagcgcaagtttctgggtcgtccgattgaagtttggaaactgtatttcacccatccgcaagatgtcccggcaatccgcgacaaaattcgtgcacacccggctgtgatcgatatttatgaatacgacatcccgtttgcgaaacgttatctgatcgataagggcctgattccgatggaaggtgacgaagaactgaccatgctggcctttgatattgaaacgctgtatcacgaaggcgaagaattcggcaccggtccgatcctgatgatttcatacgcagatggttcggaagctcgcgtgatcacctggaaaaagattgatctgccgtatgttgacgtcgtgagcacggaaaaagaaatgatcaagcgctttctgcgtattgtgaaagaaaaggatccggacgttctgattacctataacggcgataattttgacttcgcatacctgaaaaagcgttgcgaaaaactgggtatcaagttcacgctgggccgcgacggttctgaaccgaaaattcagcgcatgggcgatcgttttgcggttgaagtcaaaggtcgtatccatttcgatctgtatccggttatccgtcgcaccattaacctgccgacctatacgctggaagcggtttacgaagccgtctttggcaaaccgaaggaaaaagtgtacgcggaagaaattgcacaggcttgggaatcaggcgaaggtctggaacgcgtggcccgttattcgatggaagatgcaaaagttacctacgaactgggtcgcgaatttttcccgatggaagcccagctgagccgtctgatcggccaaagcctgtgggatgtttctcgcagctctacgggtaacctggtcgaatggtttctgctgcgtaaagcgtatgaacgcaacgaactggcgccgaataaaccggatgaaaaggaactggcacgtcgccgtggcggttatgcaggcggttacgtcaaagaaccggaacgtggcctgtgggataatattgtgtatctggactttcgcagtctgtacccgtccattatcattacccataacgttagtccggacacgctgaatcgcgaaggctgcaaagaatatgatgtggccccggaagttggtcacaagttctgtaaagactttccgggcttcatcccgtccctgctgggtgatctgctggaagaacgccagaagattaagcgtaagatgaaagcaaccgttgatccgctggaaaagaaactgctggactatcgccaacgtgcgatcaaaattctggccaacagctattacggctattacggttatgcgaaagcccgctggtactgccgtgaatgtgcagaatctgtgaccgcttggggccgcgaatatattgaaaccacgatccgtgaaatcgaagaaaagttcggtttcaaggttctgtacgctgataccgacggctttttcgcgacgatcccgggtgcagatgctgaaaccgtgaaaaagaaagctaaggaattcctgaagtacatcaacgcgaaactgccgggcctgctggaactggaatatgaaggcttctacgttcgtggctttttcgtcacgaagaaaaagtacgcggttatcgacgaagaaggcaaaattaccacgcgcggtctggaaatcgtgcgccgtgattggagtgaaattgccaaagaaacccaggcacgtgtgctggaagctctgctgaaagatggcaatgttgaagaagcggtttccattgtcaaagaagtgacggaaaagctgggtaaatatgaagtcccgccggaaaaactggtgatccatgaacaaattacccgcgaactgaaggattacaaagcgacgggcccgcacgttgctatcgcgaaacgtctggcagcgcgtggcgtgaagattcgtccgggtaccgttatcagctatattgtcctgaaaggctctggtcgtatcggtgaccgcgcgattccgtttgatgaattcgacccgacgaaacatcgctacgatgcagaatattacatcgaaaaccaggttctgccggctgtcgaacgtattctgaaagcgtttggctatcgtgccgaagatctgcgctaccagaaaacccgtcaagtgggcctgggtgtttggctgcaaccgaaaggtaagaaataa

SEQ ID NO: 71 - DNA, 2325 bp, Artificial Sequence
  Synthetic
atgattctggatacggactatattacggaaaatggcaagccggttattcgtgtgttcaaaaaggaaaatggcgaattcaagatcgaatatgatcgtacctttgaaccgtatttctacgctctgctgaaagatgacagcgcgatcgaagatgtcaaaaaggtgaccgccaaacgccatggcacggtggttcgcgtcaagcgtgcagaaaaagtgcagcgcaagtttctgggtcgtccgattgaagtttggaaactgtatttcacccatccgcaagatgtcccggcaatccgcgacaaaattcgtgcacacccggctgtgatcgatatttatgaatacgacatcccgtttgcgaaacgttatctgatcgataagggcctgattccgatggaaggtgacgaagaactgaccatgctggcctttgatattgaaacgctgtatcacgaaggcgaagaattcggcaccggtccgatcctgatgatttcatacgcagatggttcggaagctcgcgtgatcacctggaaaaagattgatctgccgtatgttgacgtcgtgagcacggaaaaagaaatgatcaagcgctttctgcgtattgtgaaagaaaaggatccggacgttctgattacctataacggcgataattttgacttcgcatacctgaaaaagcgttgcgaaaaactgggtatcaagttcacgctgggccgcgacggttctgaaccgaaaattcagcgcatgggcgatcgttttgcggttgaagtcaaaggtcgtatccatttcgatctgtatccggttatccgtcgcaccattaacctgccgacctatacgctggaagcggtttacgaagccgtctttggcaaaccgaaggaaaaagtgtacgcggaagaaattgcacaggcttgggaatcaggcgaaggtctggaacgcgtggcccgttattcgatggaagatgcaaaagttacctacgaactgggtcgcgaatttttcccgatggaagcccagctgagccgtctgatcggccaaagcctgtgggatgtttctcgcagctctacgggtaacctggtcgaatggtttctgctgcgtaaagcgtatgaacgcaacgaactggcgccgaataaaccggatgaaaaggaactggcacgtcgccgtggcggttatgcaggcggttacgtcaaagaaccggaacgtggcctgtgggataatattgtgtatctggactttcgcagtctgtacccgtccattatcattacccataacgttagtccggacacgctgaatcgcgaaggctgcaaagaatatgatgtggccccggaagttggtcacaagttctgtaaagactttccgggcttcatcccgtccctgctgggtgatctgctggaagaacgccagaagattaagcgtaagatgaaagcaaccgttgatccgctggaaaagaaactgctggactatcgccaacgtgcgatcaaaattctggccaacagctattacggctattacggttatgcgaaagcccgctggtactgccgtgaatgtgcagaatctgtgaccgcttggggccgcgaatatattgaaaccacgatccgtgaaatcgaagaaaagttcggtttcaaggttctgtacgctgataccgacggctttttcgcgacgatcccgggtgcagatgctgaaaccgtgaaaaagaaagctaaggaattcctgaagtacatcaacgcgaaactgccgggcctgctggaactggaatatgaaggcttctacgttcgtggctttttcgtcacgaagaaaaagtacgcggttatcgacgaagaaggcaaaattaccacgcgcggtctggaaatcgtgcgccgtgattggagtgaaattgccaaagaaacccaggcaaaggttctggaagcaattctgaaacatggtaacgtcgaagaagcggtcaagatcgtgaaagaagttaccgaaaaactgtcgaattatgaaattccggtcgaaaagctggtgatctacgaacaaattacgcgcccgctgaacgaatataaagccattggcccgcacgtggcagttgctaaacgtctggcggccaagggtatcaagattaaaccgggcatggtgattggttatgttgtcctgcgcggcgatggtccgatcagcaaacgtgcgatcgccatcgaagaattcgatggcaaaaagcataagtacgacgcagaatactacatcgaaaatcaggttctgccggccgtcgaacgtatcctgaaagcattcggttataagcgtgaagatctgcgctggcagaagaccaaacaagtgggcctgggtgcgtggctgaaagttaaaaagtcttaa

SEQ ID NO: 72 - DNA, 2328 bp, Artificial Sequence
  Synthetic
atgattctggatacggactatattacggaaaatggcaagccggttattcgtgtgttcaaaaaggaaaatggcgaattcaagatcgaatatgatcgtacctttgaaccgtatttctacgctctgctgaaagatgacagcgcgatcgaagatgtcaaaaaggtgaccgccaaacgccatggcacggtggttcgcgtcaagcgtgcagaaaaagtgcagcgcaagtttctgggtcgtccgattgaagtttggaaactgtatttcacccatccgcaagatgtcccggcaatccgcgacaaaattcgtgcacacccggctgtgatcgatatttatgaatacgacatcccgtttgcgaaacgttatctgatcgataagggcctgattccgatggaaggtgacgaagaactgaccatgctggcctttgatattgaaacgctgtatcacgaaggcgaagaattcggcaccggtccgatcctgatgatttcatacgcagatggttcggaagctcgcgtgatcacctggaaaaagattgatctgccgtatgttgacgtcgtgagcacggaaaaagaaatgatcaagcgctttctgcgtattgtgaaagaaaaggatccggacgttctgattacctataacggcgataattttgacttcgcatacctgaaaaagcgttgcgaaaaactgggtatcaagttcacgctgggccgcgacggttctgaaccgaaaattcagcgcatgggcgatcgttttgcggttgaagtcaaaggtcgtatccatttcgatctgtatccggttatccgtcgcaccattaacctgccgacctatacgctggaagcggtttacgaagccgtctttggcaaaccgaaggaaaaagtgtacgcggaagaaattgcacaggcttgggaatcaggcgaaggtctggaacgcgtggcccgttattcgatggaagatgcaaaagttacctacgaactgggtcgcgaatttttcccgatggaagcccagctgagccgtctgatcggccaaagcctgtgggatgtttctcgcagctctacgggtaacctggtcgaatggtttctgctgcgtaaagcgtatgaacgcaacgaactggcgccgaataaaccggatgaaaaggaactggcacgtcgccgtggcggttatgcaggcggttacgtcaaagaaccggaacgtggcctgtgggataatattgtgtatctggactttcgcagtctgtacccgtccattatcattacccataacgttagtccggacacgctgaatcgcgaaggctgcaaagaatatgatgtggccccggaagttggtcacaagttctgtaaagactttccgggcttcatcccgtccctgctgggtgatctgctggaagaacgccagaagattaagcgtaagatgaaagcaaccgttgatccgctggaaaagaaactgctggactatcgccaacgtgcgatcaaaattctggccaacagctattacggctattacggttatgcgaaagcccgctggtactgccgtgaatgtgcagaatctgtgaccgcttggggccgcgaatatattgaaaccacgatccgtgaaatcgaagaaaagttcggtttcaaggttctgtacgctgataccgacggctttttcgcgacgatcccgggtgcagatgctgaaaccgtgaaaaagaaagctaaggaattcctgaagtacatcaacgcgaaactgccgggcctgctggaactggaatatgaaggcttctacgttcgtggctttttcgtcacgaagaaaaagtacgcggttatcgacgaagaaggcaaaattaccacgcgcggtctggaaatcgtgcgccgtgattggagtgaaattgccaaagaaacccaggcacgtgttctggaagcactgctgaaagatggtaatgtcgaagaagcagtgagtattgttaaagaagtcacggaaaaactgtccaagtatgaagtcccgccggaaaaactggtgattcatgaacaaatcacccgcgaactgaaagattacaaggcgacgggcccgcacgtggcaattgctaaacgtctggcagcgcgtggcgttaagatccgtccgggtaccgttattagctatatcgtcctgaaaggctctggtcgtattggtgaccgcgccatcccgtttgatgaattcgacccggctaaacaccgctacgatgcggaatattacattgaaaatcaggtcctgccggctgtggaacgtatcctgaaagcgtttggctatcgtaaggaagatctgcgctaccagaaaacccgtcaagtgggcctgggtgcgtggctgaaaccgaagggtaaaaagtaa

SEQ ID NO: 73 - DNA, 2328 bp, Artificial Sequence
  Synthetic
atgattctggatacggactatattacggaaaatggcaagccggttattcgtgtgttcaaaaaggaaaatggcgaattcaagatcgaatatgatcgtacctttgaaccgtatttctacgctctgctgaaagatgacagcgcgatcgaagatgtcaaaaaggtgaccgccaaacgccatggcacggtggttcgcgtcaagcgtgcagaaaaagtgcagcgcaagtttctgggtcgtccgattgaagtttggaaactgtatttcacccatccgcaagatgtcccggcaatccgcgacaaaattcgtgcacacccggctgtgatcgatatttatgaatacgacatcccgtttgcgaaacgttatctgatcgataagggcctgattccgatggaaggtgacgaagaactgaccatgctggcctttgatattgaaacgctgtatcacgaaggcgaagaattcggcaccggtccgatcctgatgatttcatacgcagatggttcggaagctcgcgtgatcacctggaaaaagattgatctgccgtatgttgacgtcgtgagcacggaaaaagaaatgatcaagcgctttctgcgtattgtgaaagaaaaggatccggacgttctgattacctataacggcgataattttgacttcgcatacctgaaaaagcgttgcgaaaaactgggtatcaagttcacgctgggccgcgacggttctgaaccgaaaattcagcgcatgggcgatcgttttgcggttgaagtcaaaggtcgtatccatttcgatctgtatccggttatccgtcgcaccattaacctgccgacctatacgctggaagcggtttacgaagccgtctttggcaaaccgaaggaaaaagtgtacgcggaagaaattgcacaggcttgggaatcaggcgaaggtctggaacgcgtggcccgttattcgatggaagatgcaaaagttacctacgaactgggtcgcgaatttttcccgatggaagcccagctgagccgtctgatcggccaaagcctgtgggatgtttctcgcagctctacgggtaacctggtcgaatggtttctgctgcgtaaagcgtatgaacgcaacgaactggcgccgaataaaccggatgaaaaggaactggcacgtcgccgtggcggttatgcaggcggttacgtcaaagaaccggaacgtggcctgtgggataatattgtgtatctggactttcgcagtctgtacccgtccattatcattacccataacgttagtccggacacgctgaatcgcgaaggctgcaaagaatatgatgtggccccggaagttggtcacaagttctgtaaagactttccgggcttcatcccgtccctgctgggtgatctgctggaagaacgccagaagattaagcgtaagatgaaagcaaccgttgatccgctggaaaagaaactgctggactatcgccaacgtgcgatcaaaattctggccaacagctattacggctattacggttatgcgaaagcccgctggtactgccgtgaatgtgcagaatctgtgaccgcttggggccgcgaatatattgaaaccacgatccgtgaaatcgaagaaaagttcggtttcaaggttctgtacgctgataccgacggctttttcgcgacgatcccgggtgcagatgctgaaaccgtgaaaaagaaagctaaggaattcctgaagtacatcaacgcgaaactgccgggcctgctggaactggaatatgaaggcttctacgttcgtggctttttcgtcacgaagaaaaagtacgcggttatcgacgaagaaggcaaaattaccacgcgcggtctggaaatcgtgcgccgtgattggagtgaaattgccaaagaaacccaggcacgcgtcctggaagcaatcctgaaagatggtgacgtggaagaagccgtccgtattgtgaaagaagttacggaaaaactgtccaaatatgaagttccgccggaaaaactggtcatccatgaacaaattacccgcgaactgaaagattacaaagcgacgggcccgcacgtcgcaatcgctaaacgtctggcggcgcgtggcgtgaaaattcgtccgggtaccgtgatctcatatattgttctgaaaggctcgggtcgtatcggtgaccgcgctattccgtttgatgaattcgacccgaaaaaacacaaatacgatgcggaatactacatcgaaaaccaggttctgccggccgtcgaacgtattctgcgcgcatttggctaccgtaaagaagatctgcgttatcaaaaaaccaaacaagtgggtctgggtgcgtggctgaaaccgaaaggtaaaaaataa

SEQ ID NO: 74 - DNA, 2325 bp, Artificial Sequence
  Synthetic
atgattctggatacggactatattacggaaaatggcaagccggttattcgtgtgttcaaaaaggaaaatggcgaattcaagatcgaatatgatcgtacctttgaaccgtatttctacgctctgctgaaagatgacagcgcgatcgaagatgtcaaaaaggtgaccgccaaacgccatggcacggtggttcgcgtcaagcgtgcagaaaaagtgcagcgcaagtttctgggtcgtccgattgaagtttggaaactgtatttcacccatccgcaagatgtcccggcaatccgcgacaaaattcgtgcacacccggctgtgatcgatatttatgaatacgacatcccgtttgcgaaacgttatctgatcgataagggcctgattccgatggaaggtgacgaagaactgaccatgctggcctttgatattgaaacgctgtatcacgaaggcgaagaattcggcaccggtccgatcctgatgatttcatacgcagatggttcggaagctcgcgtgatcacctggaaaaagattgatctgccgtatgttgacgtcgtgagcacggaaaaagaaatgatcaagcgctttctgcgtattgtgaaagaaaaggatccggacgttctgattacctataacggcgataattttgacttcgcatacctgaaaaagcgttgcgaaaaactgggtatcaagttcacgctgggccgcgacggttctgaaccgaaaattcagcgcatgggcgatcgttttgcggttgaagtcaaaggtcgtatccatttcgatctgtatccggttatccgtcgcaccattaacctgccgacctatacgctggaagcggtttacgaagccgtctttggcaaaccgaaggaaaaagtgtacgcggaagaaattgcacaggcttgggaatcaggcgaaggtctggaacgcgtggcccgttattcgatggaagatgcaaaagttacctacgaactgggtcgcgaatttttcccgatggaagcccagctgagccgtctgatcggccaaagcctgtgggatgtttctcgcagctctacgggtaacctggtcgaatggtttctgctgcgtaaagcgtatgaacgcaacgaactggcgccgaataaaccggatgaaaaggaactggcacgtcgccgtggcggttatgcaggcggttacgtcaaagaaccggaacgtggcctgtgggataatattgtgtatctggactttcgcagtctgtacccgtccattatcattacccataacgttagtccggacacgctgaatcgcgaaggctgcaaagaatatgatgtggccccggaagttggtcacaagttctgtaaagactttccgggcttcatcccgtccctgctgggtgatctgctggaagaacgccagaagattaagcgtaagatgaaagcaaccgttgatccgctggaaaagaaactgctggactatcgccaacgtgcgatcaaaattctggccaacagctattacggctattacggttatgcgaaagcccgctggtactgccgtgaatgtgcagaatctgtgaccgcttggggccgcgaatatattgaaaccacgatccgtgaaatcgaagaaaagttcggtttcaaggttctgtacgctgataccgacggctttttcgcgacgatcccgggtgcagatgctgaaaccgtgaaaaagaaagctaaggaattcctgaagtacatcaacgcgaaactgccgggcctgctggaactggaatatgaaggcttctacgttcgtggctttttcgtcacgaagaaaaagtacgcggttatcgacgaagaaggcaaaattaccacgcgcggtctggaaatcgtgcgccgtgattggagtgaaattgccaaagaaacccaggcacgtgttctggaagcaattctgaaacatggtaacgtcgaagaagcggtcaaaatcgtgaaagaagttacggaaaaactgtctaactacgaaattccgccggaaaaactggccatctacgaacaaattacccgcccgctgcatgaatataaagcaatcggtccgcacgtcgcagtggcaaaacgtctggcagcacgcggcgttaaagtcaaaccgggtatggtcatcggctatattgtgctgcgtggtgatggcccgatcagcaaccgcgcaattctggctgaagaatacgatctgaaaaaacacaaatacgacgccgaatattacatcgaaaatcaggttctgccggctgtcctgcgtattctggaagcgtttggctatcgtaaagaagatctgcgctggcagaaaacccgtcaaacgggtctgacctcatggctgaatattaaaaaatcgtaa

SEQ ID NO: 75 - DNA, 2325 bp, Artificial Sequence
  Synthetic
atgattctggatacggactatattacggaaaatggcaagccggttattcgtgtgttcaaaaaggaaaatggcgaattcaagatcgaatatgatcgtacctttgaaccgtatttctacgctctgctgaaagatgacagcgcgatcgaagatgtcaaaaaggtgaccgccaaacgccatggcacggtggttcgcgtcaagcgtgcagaaaaagtgcagcgcaagtttctgggtcgtccgattgaagtttggaaactgtatttcacccatccgcaagatgtcccggcaatccgcgacaaaattcgtgcacacccggctgtgatcgatatttatgaatacgacatcccgtttgcgaaacgttatctgatcgataagggcctgattccgatggaaggtgacgaagaactgaccatgctggcctttgatattgaaacgctgtatcacgaaggcgaagaattcggcaccggtccgatcctgatgatttcatacgcagatggttcggaagctcgcgtgatcacctggaaaaagattgatctgccgtatgttgacgtcgtgagcacggaaaaagaaatgatcaagcgctttctgcgtattgtgaaagaaaaggatccggacgttctgattacctataacggcgataattttgacttcgcatacctgaaaaagcgttgcgaaaaactgggtatcaagttcacgctgggccgcgacggttctgaaccgaaaattcagcgcatgggcgatcgttttgcggttgaagtcaaaggtcgtatccatttcgatctgtatccggttatccgtcgcaccattaacctgccgacctatacgctggaagcggtttacgaagccgtctttggcaaaccgaaggaaaaagtgtacgcggaagaaattgcacaggcttgggaatcaggcgaaggtctggaacgcgtggcccgttattcgatggaagatgcaaaagttacctacgaactgggtcgcgaatttttcccgatggaagcccagctgagccgtctgatcggccaaagcctgtgggatgtttctcgcagctctacgggtaacctggtcgaatggtttctgctgcgtaaagcgtatgaacgcaacgaactggcgccgaataaaccggatgaaaaggaactggcacgtcgccgtggcggttatgcaggcggttacgtcaaagaaccggaacgtggcctgtgggataatattgtgtatctggactttcgcagtctgtacccgtccattatcattacccataacgttagtccggacacgctgaatcgcgaaggctgcaaagaatatgatgtggccccggaagttggtcacaagttctgtaaagactttccgggcttcatcccgtccctgctgggtgatctgctggaagaacgccagaagattaagcgtaagatgaaagcaaccgttgatccgctggaaaagaaactgctggactatcgccaacgtgcgatcaaaattctggccaacagctattacggctattacggttatgcgaaagcccgctggtactgccgtgaatgtgcagaatctgtgaccgcttggggccgcgaatatattgaaaccacgatccgtgaaatcgaagaaaagttcggtttcaaggttctgtacgctgataccgacggctttttcgcgacgatcccgggtgcagatgctgaaaccgtgaaaaagaaagctaaggaattcctgaagtacatcaacgcgaaactgccgggcctgctggaactggaatatgaaggcttctacgttcgtggctttttcgtcacgaagaaaaagtacgcggttatcgacgaagaaggcaaaattaccacgcgcggtctggaaatcgtgcgccgtgattggagtgaaattgccaaagaaacccaggcaaaagttctggaagcaatcctgaaacatggtaatgtcgaagaagcagtgaaaattgtcaaggaagtgacggaaaaactgtcgaagtatgaaatcccgccggaaaaactggtgatctacgaacaaattacccgcccgctgcatgaatataaagcgattggcccgcacgtggcagttgctaaacgtctggcagcccgcggtgtcaaagtgcgtccgggcatggtgatcggttatattgttctgcgtggcgatggtccgatcagtaaacgcgcgattctggccgaagaatttgatccgcgcaaacacaagtacgacgccgaatattacatcgaaaaccaggtgctgccggctgttctgcgtattctggaagcgttcggctatcgtaaagaagatctgcgctggcagaaaaccaagcaaacgggtctgaccgcatggctgaatgtgaaaaagaaataa

SEQ ID NO: 76 - DNA, 2328 bp, Artificial Sequence
  Synthetic
atgattctggatacggactatattacggaaaatggcaagccggttattcgtgtgttcaaaaaggaaaatggcgaattcaagatcgaatatgatcgtacctttgaaccgtatttctacgctctgctgaaagatgacagcgcgatcgaagatgtcaaaaaggtgaccgccaaacgccatggcacggtggttcgcgtcaagcgtgcagaaaaagtgcagcgcaagtttctgggtcgtccgattgaagtttggaaactgtatttcacccatccgcaagatgtcccggcaatccgcgacaaaattcgtgcacacccggctgtgatcgatatttatgaatacgacatcccgtttgcgaaacgttatctgatcgataagggcctgattccgatggaaggtgacgaagaactgaccatgctggcctttgatattgaaacgctgtatcacgaaggcgaagaattcggcaccggtccgatcctgatgatttcatacgcagatggttcggaagctcgcgtgatcacctggaaaaagattgatctgccgtatgttgacgtcgtgagcacggaaaaagaaatgatcaagcgctttctgcgtattgtgaaagaaaaggatccggacgttctgattacctataacggcgataattttgacttcgcatacctgaaaaagcgttgcgaaaaactgggtatcaagttcacgctgggccgcgacggttctgaaccgaaaattcagcgcatgggcgatcgttttgcggttgaagtcaaaggtcgtatccatttcgatctgtatccggttatccgtcgcaccattaacctgccgacctatacgctggaagcggtttacgaagccgtctttggcaaaccgaaggaaaaagtgtacgcggaagaaattgcacaggcttgggaatcaggcgaaggtctggaacgcgtggcccgttattcgatggaagatgcaaaagttacctacgaactgggtcgcgaatttttcccgatggaagcccagctgagccgtctgatcggccaaagcctgtgggatgtttctcgcagctctacgggtaacctggtcgaatggtttctgctgcgtaaagcgtatgaacgcaacgaaattgcgccgaataaaccggatgaacgtgaactggcacgtcgccgtggcggttatgcaggcggttacgttaaagaaccggaacgcggcctgtgggataatatcgtctatctggactttatgagtctgtacccgtccattatcattacccataacgttagtccggacacgttcaatcgtgaaggctgcaaagaatatgataccgccccgcaggttggtcacaagttttgtaaagacgtccaaggcttcattccgagtctgctgggtgccctgctggatgaacgccagaaaatcaagaaacgtatgaaggcatccattgatccgctggaaaagaaactgctggactatcgccaaaaggcgatcaaaattctggccaactcatattacggctattacggttatgcacgcgctcgttggtactgcaaagaatgtgcagaatcggtgaccgcttggggccgtgattatattgaaaccacgatccacgaaattgaagaacgctttggtttcaaagttctgtacgctgataccgacggctttttcgcgacgatcccgggtgcggatgccgaaaccgtgaagaaaaaggctaaggaattcctgaagtacatcaacgcgaaactgccgggcctgctggaactggaatatgaaggcttctacgtccgtggctttttcgtgaccaaaaagaaatacgcggttatcgacgaagaaggcaaaattaccacgcgcggtctggaaatcgtgcgccgtgattggagtgaaattgccaaagaaacccaggcacgcgttctggaagcaatcctgcgtcatggtgacgtcgaagaagccgttcgcattgtcaaagatgtgacggaaaagctgtcgaaatatgaagtcccgccggaaaaactggtgatccatgaacaaattacccgtgaactgaaggattacaaagcgacgggcccgcacgttgcaattgctaaacgcctggcagcccgtggcatcaagattcgtccgggtaccgttatcagctatattgtcctgaaaggctctggtcgcatcggtgatcgtgctattccgtttgatgaattcgacccgacgaaacaccgttacgatgccgaatattacatcgaaaatcaggtgctgccggccgttgaacgcattctgaaagcatttggctataagaaagaagaactgcgctaccagaaaacccgtcaagtgggcctgggtgcgtggctgaagctgaaaggtaagaaataa

SEQ ID NO: 77 - DNA, 2322 bp, Artificial Sequence
  Synthetic
atgattctggatacggactatattacggaaaatggcaagccggttattcgtgtgttcaaaaaggaaaatggcgaattcaagatcgaatatgatcgtacctttgaaccgtatttctacgctctgctgaaagatgacagcgcgatcgaagatgtcaaaaaggtgaccgccaaacgccatggcacggtggttcgcgtcaagcgtgcagaaaaagtgcagcgcaagtttctgggtcgtccgattgaagtttggaaactgtatttcacccatccgcaagatgtcccggcaatccgcgacaaaattcgtgcacacccggctgtgatcgatatttatgaatacgacatcccgtttgcgaaacgttatctgatcgataagggcctgattccgatggaaggtgacgaagaactgaccatgctggcctttgatattgaaacgctgtatcacgaaggcgaagaattcggcaccggtccgatcctgatgatttcatacgcagatggttcggaagctcgcgtgatcacctggaaaaagattgatctgccgtatgttgacgtcgtgagcacggaaaaagaaatgatcaagcgctttctgcgtattgtgaaagaaaaggatccggacgttctgattacctataacggcgataattttgacttcgcatacctgaaaaagcgttgcgaaaaactgggtatcaagttcacgctgggccgcgacggttctgaaccgaaaattcagcgcatgggcgatcgttttgcggttgaagtcaaaggtcgtatccatttcgatctgtatccggttatccgtcgcaccattaacctgccgacctatacgctggaagcggtttacgaagccgtctttggcaaaccgaaggaaaaagtgtacgcggaagaaattgcacaggcttgggaatcaggcgaaggtctggaacgcgtggcccgttattcgatggaagatgcaaaagttacctacgaactgggtcgcgaatttttcccgatggaagcccagctgagccgtctgatcggccaaagcctgtgggatgtttctcgcagctctacgggtaacctggtcgaatggtttctgctgcgtaaagcgtatgaacgcaacgaaattgcgccgaataaaccggatgaacgtgaactggcacgtcgccgtggcggttatgcaggcggttacgttaaagaaccggaacgcggcctgtgggataatatcgtctatctggactttatgagtctgtacccgtccattatcattacccataacgttagtccggacacgttcaatcgtgaaggctgcaaagaatatgataccgccccgcaggttggtcacaagttttgtaaagacgtccaaggcttcattccgagtctgctgggtgccctgctggatgaacgccagaaaatcaagaaacgtatgaaggcatccattgatccgctggaaaagaaactgctggactatcgccaaaaggcgatcaaaattctggccaactcatattacggctattacggttatgcacgcgctcgttggtactgcaaagaatgtgcagaatcggtgaccgcttggggccgtgattatattgaaaccacgatccacgaaattgaagaacgctttggtttcaaagttctgtacgctgataccgacggctttttcgcgacgatcccgggtgcggatgccgaaaccgtgaagaaaaaggctaaggaattcctgaagtacatcaacgcgaaactgccgggcctgctggaactggaatatgaaggcttctacgtccgtggctttttcgtgaccaaaaagaaatacgcggttatcgacgaagaaggcaaaattaccacgcgcggtctggaaatcgtgcgccgtgattggagtgaaattgccaaagaaacccaggcacgtgtcctggaagcaatcctgaaacatggtgatgtggaagaagcggttcgcattgtcaaagaagtgacggaaaagctgtcgaaatatgaagttccgccggaaaaactggtcatccatgaacaaattacccgcgatctgcgtgactacaaagccacgggtccgcacgtggcagttgcaaaacgtctggcagcccgtggcgtgaagattcgtccgggtaccgtgatcagttatattgttctgaaaggctccggtcgcatcggtgaccgtgctattccgtttgatgaattcgacccgacgaaacaccgttacgatgccgaatattacatcgaaaatcaggtcctgccggccgtggaacgcattctgaaagcatttggttatcgcaaggaagatctgcgttaccagaagaccaaacaagtcggcctgggtgcgtggctgaaagtgaaaaagtaa

SEQ ID NO: 78 - DNA, 2328 bp, Artificial Sequence
  Synthetic
atgattctggatacggactatattacggaaaatggcaagccggttattcgtgtgttcaaaaaggaaaatggcgaattcaagatcgaatatgatcgtacctttgaaccgtatttctacgctctgctgaaagatgacagcgcgatcgaagatgtcaaaaaggtgaccgccaaacgccatggcacggtggttcgcgtcaagcgtgcagaaaaagtgcagcgcaagtttctgggtcgtccgattgaagtttggaaactgtatttcacccatccgcaagatgtcccggcaatccgcgacaaaattcgtgcacacccggctgtgatcgatatttatgaatacgacatcccgtttgcgaaacgttatctgatcgataagggcctgattccgatggaaggtgacgaagaactgaccatgctggcctttgatattgaaacgctgtatcacgaaggcgaagaattcggcaccggtccgatcctgatgatttcatacgcagatggttcggaagctcgcgtgatcacctggaaaaagattgatctgccgtatgttgacgtcgtgagcacggaaaaagaaatgatcaagcgctttctgcgtattgtgaaagaaaaggatccggacgttctgattacctataacggcgataattttgacttcgcatacctgaaaaagcgttgcgaaaaactgggtatcaagttcacgctgggccgcgacggttctgaaccgaaaattcagcgcatgggcgatcgttttgcggttgaagtcaaaggtcgtatccatttcgatctgtatccggttatccgtcgcaccattaacctgccgacctatacgctggaagcggtttacgaagccgtctttggcaaaccgaaggaaaaagtgtacgcggaagaaattgcacaggcttgggaatcaggcgaaggtctggaacgcgtggcccgttattcgatggaagatgcaaaagttacctacgaactgggtcgcgaatttttcccgatggaagcccagctgagccgtctgatcggccaaagcctgtgggatgtttctcgcagctctacgggtaacctggtcgaatggtttctgctgcgtaaagcgtatgaacgcaacgaaattgcgccgaataaaccggatgaacgtgaactggcacgtcgccgtggcggttatgcaggcggttacgttaaagaaccggaacgcggcctgtgggataatatcgtctatctggactttatgagtctgtacccgtccattatcattacccataacgttagtccggacacgttcaatcgtgaaggctgcaaagaatatgataccgccccgcaggttggtcacaagttttgtaaagacgtccaaggcttcattccgagtctgctgggtgccctgctggatgaacgccagaaaatcaagaaacgtatgaaggcatccattgatccgctggaaaagaaactgctggactatcgccaaaaggcgatcaaaattctggccaactcatattacggctattacggttatgcacgcgctcgttggtactgcaaagaatgtgcagaatcggtgaccgcttggggccgtgattatattgaaaccacgatccacgaaattgaagaacgctttggtttcaaagttctgtacgctgataccgacggctttttcgcgacgatcccgggtgcggatgccgaaaccgtgaagaaaaaggctaaggaattcctgaagtacatcaacgcgaaactgccgggcctgctggaactggaatatgaaggcttctacgtccgtggctttttcgtgaccaaaaagaaatacgcggttatcgacgaagaaggcaaaattaccacgcgcggtctggaaatcgtgcgccgtgattggagtgaaattgccaaagaaacccaggcacgtgtgctggaagctctgctgaaagatggcaatgttgaagaagcggtttccattgtcaaagaagtgacggaaaagctgggtaaatatgaagtcccgccggaaaaactggtgatccatgaacaaattacccgcgaactgaaggattacaaagcgacgggcccgcacgttgctatcgcgaaacgtctggcagcgcgtggcgtgaagattcgtccgggtaccgttatcagctatattgtcctgaaaggctctggtcgtatcggtgaccgcgcgattccgtttgatgaattcgacccgacgaaacatcgctacgatgcagaatattacatcgaaaaccaggttctgccggctgtcgaacgtattctgaaagcgtttggctatcgtgccgaagatctgcgctaccagaaaacccgtcaagtgggcctgggtgtttggctgcaaccgaaaggtaagaaataa

SEQ ID NO: 79 - DNA, 2325 bp, Artificial Sequence
  Synthetic
atgattctggatacggactatattacggaaaatggcaagccggttattcgtgtgttcaaaaaggaaaatggcgaattcaagatcgaatatgatcgtacctttgaaccgtatttctacgctctgctgaaagatgacagcgcgatcgaagatgtcaaaaaggtgaccgccaaacgccatggcacggtggttcgcgtcaagcgtgcagaaaaagtgcagcgcaagtttctgggtcgtccgattgaagtttggaaactgtatttcacccatccgcaagatgtcccggcaatccgcgacaaaattcgtgcacacccggctgtgatcgatatttatgaatacgacatcccgtttgcgaaacgttatctgatcgataagggcctgattccgatggaaggtgacgaagaactgaccatgctggcctttgatattgaaacgctgtatcacgaaggcgaagaattcggcaccggtccgatcctgatgatttcatacgcagatggttcggaagctcgcgtgatcacctggaaaaagattgatctgccgtatgttgacgtcgtgagcacggaaaaagaaatgatcaagcgctttctgcgtattgtgaaagaaaaggatccggacgttctgattacctataacggcgataattttgacttcgcatacctgaaaaagcgttgcgaaaaactgggtatcaagttcacgctgggccgcgacggttctgaaccgaaaattcagcgcatgggcgatcgttttgcggttgaagtcaaaggtcgtatccatttcgatctgtatccggttatccgtcgcaccattaacctgccgacctatacgctggaagcggtttacgaagccgtctttggcaaaccgaaggaaaaagtgtacgcggaagaaattgcacaggcttgggaatcaggcgaaggtctggaacgcgtggcccgttattcgatggaagatgcaaaagttacctacgaactgggtcgcgaatttttcccgatggaagcccagctgagccgtctgatcggccaaagcctgtgggatgtttctcgcagctctacgggtaacctggtcgaatggtttctgctgcgtaaagcgtatgaacgcaacgaaattgcgccgaataaaccggatgaacgtgaactggcacgtcgccgtggcggttatgcaggcggttacgttaaagaaccggaacgcggcctgtgggataatatcgtctatctggactttatgagtctgtacccgtccattatcattacccataacgttagtccggacacgttcaatcgtgaaggctgcaaagaatatgataccgccccgcaggttggtcacaagttttgtaaagacgtccaaggcttcattccgagtctgctgggtgccctgctggatgaacgccagaaaatcaagaaacgtatgaaggcatccattgatccgctggaaaagaaactgctggactatcgccaaaaggcgatcaaaattctggccaactcatattacggctattacggttatgcacgcgctcgttggtactgcaaagaatgtgcagaatcggtgaccgcttggggccgtgattatattgaaaccacgatccacgaaattgaagaacgctttggtttcaaagttctgtacgctgataccgacggctttttcgcgacgatcccgggtgcggatgccgaaaccgtgaagaaaaaggctaaggaattcctgaagtacatcaacgcgaaactgccgggcctgctggaactggaatatgaaggcttctacgtccgtggctttttcgtgaccaaaaagaaatacgcggttatcgacgaagaaggcaaaattaccacgcgcggtctggaaatcgtgcgccgtgattggagtgaaattgccaaagaaacccaggcaaaggttctggaagcaattctgaaacatggtaacgtcgaagaagcggtcaagatcgtgaaagaagttaccgaaaaactgtcgaattatgaaattccggtcgaaaagctggtgatctacgaacaaattacgcgcccgctgaacgaatataaagccattggcccgcacgtggcagttgctaaacgtctggcggccaagggtatcaagattaaaccgggcatggtgattggttatgttgtcctgcgcggcgatggtccgatcagcaaacgtgcgatcgccatcgaagaattcgatggcaaaaagcataagtacgacgcagaatactacatcgaaaatcaggttctgccggccgtcgaacgtatcctgaaagcattcggttataagcgtgaagatctgcgctggcagaagaccaaacaagtgggcctgggtgcgtggctgaaagttaaaaagtcttaa

SEQ ID NO: 80 - DNA, 2328 bp, Artificial Sequence
  Synthetic
atgattctggatacggactatattacggaaaatggcaagccggttattcgtgtgttcaaaaaggaaaatggcgaattcaagatcgaatatgatcgtacctttgaaccgtatttctacgctctgctgaaagatgacagcgcgatcgaagatgtcaaaaaggtgaccgccaaacgccatggcacggtggttcgcgtcaagcgtgcagaaaaagtgcagcgcaagtttctgggtcgtccgattgaagtttggaaactgtatttcacccatccgcaagatgtcccggcaatccgcgacaaaattcgtgcacacccggctgtgatcgatatttatgaatacgacatcccgtttgcgaaacgttatctgatcgataagggcctgattccgatggaaggtgacgaagaactgaccatgctggcctttgatattgaaacgctgtatcacgaaggcgaagaattcggcaccggtccgatcctgatgatttcatacgcagatggttcggaagctcgcgtgatcacctggaaaaagattgatctgccgtatgttgacgtcgtgagcacggaaaaagaaatgatcaagcgctttctgcgtattgtgaaagaaaaggatccggacgttctgattacctataacggcgataattttgacttcgcatacctgaaaaagcgttgcgaaaaactgggtatcaagttcacgctgggccgcgacggttctgaaccgaaaattcagcgcatgggcgatcgttttgcggttgaagtcaaaggtcgtatccatttcgatctgtatccggttatccgtcgcaccattaacctgccgacctatacgctggaagcggtttacgaagccgtctttggcaaaccgaaggaaaaagtgtacgcggaagaaattgcacaggcttgggaatcaggcgaaggtctggaacgcgtggcccgttattcgatggaagatgcaaaagttacctacgaactgggtcgcgaatttttcccgatggaagcccagctgagccgtctgatcggccaaagcctgtgggatgtttctcgcagctctacgggtaacctggtcgaatggtttctgctgcgtaaagcgtatgaacgcaacgaaattgcgccgaataaaccggatgaacgtgaactggcacgtcgccgtggcggttatgcaggcggttacgttaaagaaccggaacgcggcctgtgggataatatcgtctatctggactttatgagtctgtacccgtccattatcattacccataacgttagtccggacacgttcaatcgtgaaggctgcaaagaatatgataccgccccgcaggttggtcacaagttttgtaaagacgtccaaggcttcattccgagtctgctgggtgccctgctggatgaacgccagaaaatcaagaaacgtatgaaggcatccattgatccgctggaaaagaaactgctggactatcgccaaaaggcgatcaaaattctggccaactcatattacggctattacggttatgcacgcgctcgttggtactgcaaagaatgtgcagaatcggtgaccgcttggggccgtgattatattgaaaccacgatccacgaaattgaagaacgctttggtttcaaagttctgtacgctgataccgacggctttttcgcgacgatcccgggtgcggatgccgaaaccgtgaagaaaaaggctaaggaattcctgaagtacatcaacgcgaaactgccgggcctgctggaactggaatatgaaggcttctacgtccgtggctttttcgtgaccaaaaagaaatacgcggttatcgacgaagaaggcaaaattaccacgcgcggtctggaaatcgtgcgccgtgattggagtgaaattgccaaagaaacccaggcacgtgttctggaagcactgctgaaagatggtaatgtcgaagaagcagtgagtattgttaaagaagtcacggaaaaactgtccaagtatgaagtcccgccggaaaaactggtgattcatgaacaaatcacccgcgaactgaaagattacaaggcgacgggcccgcacgtggcaattgctaaacgtctggcagcgcgtggcgttaagatccgtccgggtaccgttattagctatatcgtcctgaaaggctctggtcgtattggtgaccgcgccatcccgtttgatgaattcgacccggctaaacaccgctacgatgcggaatattacattgaaaatcaggtcctgccggctgtggaacgtatcctgaaagcgtttggctatcgtaaggaagatctgcgctaccagaaaacccgtcaagtgggcctgggtgcgtggctgaaaccgaagggtaaaaagtaa

SEQ ID NO: 81 - DNA, 2328 bp, Artificial Sequence
  Synthetic
atgattctggatacggactatattacggaaaatggcaagccggttattcgtgtgttcaaaaaggaaaatggcgaattcaagatcgaatatgatcgtacctttgaaccgtatttctacgctctgctgaaagatgacagcgcgatcgaagatgtcaaaaaggtgaccgccaaacgccatggcacggtggttcgcgtcaagcgtgcagaaaaagtgcagcgcaagtttctgggtcgtccgattgaagtttggaaactgtatttcacccatccgcaagatgtcccggcaatccgcgacaaaattcgtgcacacccggctgtgatcgatatttatgaatacgacatcccgtttgcgaaacgttatctgatcgataagggcctgattccgatggaaggtgacgaagaactgaccatgctggcctttgatattgaaacgctgtatcacgaaggcgaagaattcggcaccggtccgatcctgatgatttcatacgcagatggttcggaagctcgcgtgatcacctggaaaaagattgatctgccgtatgttgacgtcgtgagcacggaaaaagaaatgatcaagcgctttctgcgtattgtgaaagaaaaggatccggacgttctgattacctataacggcgataattttgacttcgcatacctgaaaaagcgttgcgaaaaactgggtatcaagttcacgctgggccgcgacggttctgaaccgaaaattcagcgcatgggcgatcgttttgcggttgaagtcaaaggtcgtatccatttcgatctgtatccggttatccgtcgcaccattaacctgccgacctatacgctggaagcggtttacgaagccgtctttggcaaaccgaaggaaaaagtgtacgcggaagaaattgcacaggcttgggaatcaggcgaaggtctggaacgcgtggcccgttattcgatggaagatgcaaaagttacctacgaactgggtcgcgaatttttcccgatggaagcccagctgagccgtctgatcggccaaagcctgtgggatgtttctcgcagctctacgggtaacctggtcgaatggtttctgctgcgtaaagcgtatgaacgcaacgaaattgcgccgaataaaccggatgaacgtgaactggcacgtcgccgtggcggttatgcaggcggttacgttaaagaaccggaacgcggcctgtgggataatatcgtctatctggactttatgagtctgtacccgtccattatcattacccataacgttagtccggacacgttcaatcgtgaaggctgcaaagaatatgataccgccccgcaggttggtcacaagttttgtaaagacgtccaaggcttcattccgagtctgctgggtgccctgctggatgaacgccagaaaatcaagaaacgtatgaaggcatccattgatccgctggaaaagaaactgctggactatcgccaaaaggcgatcaaaattctggccaactcatattacggctattacggttatgcacgcgctcgttggtactgcaaagaatgtgcagaatcggtgaccgcttggggccgtgattatattgaaaccacgatccacgaaattgaagaacgctttggtttcaaagttctgtacgctgataccgacggctttttcgcgacgatcccgggtgcggatgccgaaaccgtgaagaaaaaggctaaggaattcctgaagtacatcaacgcgaaactgccgggcctgctggaactggaatatgaaggcttctacgtccgtggctttttcgtgaccaaaaagaaatacgcggttatcgacgaagaaggcaaaattaccacgcgcggtctggaaatcgtgcgccgtgattggagtgaaattgccaaagaaacccaggcacgcgtcctggaagcaatcctgaaagatggtgacgtggaagaagccgtccgtattgtgaaagaagttacggaaaaactgtccaaatatgaagttccgccggaaaaactggtcatccatgaacaaattacccgcgaactgaaagattacaaagcgacgggcccgcacgtcgcaatcgctaaacgtctggcggcgcgtggcgtgaaaattcgtccgggtaccgtgatctcatatattgttctgaaaggctcgggtcgtatcggtgaccgcgctattccgtttgatgaattcgacccgaaaaaacacaaatacgatgcggaatactacatcgaaaaccaggttctgccggccgtcgaacgtattctgcgcgcatttggctaccgtaaagaagatctgcgttatcaaaaaaccaaacaagtgggtctgggtgcgtggctgaaaccgaaaggtaaaaaataa

SEQ ID NO: 82 - DNA, 2325 bp, Artificial Sequence
  Synthetic
atgattctggatacggactatattacggaaaatggcaagccggttattcgtgtgttcaaaaaggaaaatggcgaattcaagatcgaatatgatcgtacctttgaaccgtatttctacgctctgctgaaagatgacagcgcgatcgaagatgtcaaaaaggtgaccgccaaacgccatggcacggtggttcgcgtcaagcgtgcagaaaaagtgcagcgcaagtttctgggtcgtccgattgaagtttggaaactgtatttcacccatccgcaagatgtcccggcaatccgcgacaaaattcgtgcacacccggctgtgatcgatatttatgaatacgacatcccgtttgcgaaacgttatctgatcgataagggcctgattccgatggaaggtgacgaagaactgaccatgctggcctttgatattgaaacgctgtatcacgaaggcgaagaattcggcaccggtccgatcctgatgatttcatacgcagatggttcggaagctcgcgtgatcacctggaaaaagattgatctgccgtatgttgacgtcgtgagcacggaaaaagaaatgatcaagcgctttctgcgtattgtgaaagaaaaggatccggacgttctgattacctataacggcgataattttgacttcgcatacctgaaaaagcgttgcgaaaaactgggtatcaagttcacgctgggccgcgacggttctgaaccgaaaattcagcgcatgggcgatcgttttgcggttgaagtcaaaggtcgtatccatttcgatctgtatccggttatccgtcgcaccattaacctgccgacctatacgctggaagcggtttacgaagccgtctttggcaaaccgaaggaaaaagtgtacgcggaagaaattgcacaggcttgggaatcaggcgaaggtctggaacgcgtggcccgttattcgatggaagatgcaaaagttacctacgaactgggtcgcgaatttttcccgatggaagcccagctgagccgtctgatcggccaaagcctgtgggatgtttctcgcagctctacgggtaacctggtcgaatggtttctgctgcgtaaagcgtatgaacgcaacgaaattgcgccgaataaaccggatgaacgtgaactggcacgtcgccgtggcggttatgcaggcggttacgttaaagaaccggaacgcggcctgtgggataatatcgtctatctggactttatgagtctgtacccgtccattatcattacccataacgttagtccggacacgttcaatcgtgaaggctgcaaagaatatgataccgccccgcaggttggtcacaagttttgtaaagacgtccaaggcttcattccgagtctgctgggtgccctgctggatgaacgccagaaaatcaagaaacgtatgaaggcatccattgatccgctggaaaagaaactgctggactatcgccaaaaggcgatcaaaattctggccaactcatattacggctattacggttatgcacgcgctcgttggtactgcaaagaatgtgcagaatcggtgaccgcttggggccgtgattatattgaaaccacgatccacgaaattgaagaacgctttggtttcaaagttctgtacgctgataccgacggctttttcgcgacgatcccgggtgcggatgccgaaaccgtgaagaaaaaggctaaggaattcctgaagtacatcaacgcgaaactgccgggcctgctggaactggaatatgaaggcttctacgtccgtggctttttcgtgaccaaaaagaaatacgcggttatcgacgaagaaggcaaaattaccacgcgcggtctggaaatcgtgcgccgtgattggagtgaaattgccaaagaaacccaggcacgtgttctggaagcaattctgaaacatggtaacgtcgaagaagcggtcaaaatcgtgaaagaagttacggaaaaactgtctaactacgaaattccgccggaaaaactggccatctacgaacaaattacccgcccgctgcatgaatataaagcaatcggtccgcacgtcgcagtggcaaaacgtctggcagcacgcggcgttaaagtcaaaccgggtatggtcatcggctatattgtgctgcgtggtgatggcccgatcagcaaccgcgcaattctggctgaagaatacgatctgaaaaaacacaaatacgacgccgaatattacatcgaaaatcaggttctgccggctgtcctgcgtattctggaagcgtttggctatcgtaaagaagatctgcgctggcagaaaacccgtcaaacgggtctgacctcatggctgaatattaaaaaatcgtaa

SEQ ID NO: 83 - DNA, 2325 bp, Artificial Sequence
  Synthetic
atgattctggatacggactatattacggaaaatggcaagccggttattcgtgtgttcaaaaaggaaaatggcgaattcaagatcgaatatgatcgtacctttgaaccgtatttctacgctctgctgaaagatgacagcgcgatcgaagatgtcaaaaaggtgaccgccaaacgccatggcacggtggttcgcgtcaagcgtgcagaaaaagtgcagcgcaagtttctgggtcgtccgattgaagtttggaaactgtatttcacccatccgcaagatgtcccggcaatccgcgacaaaattcgtgcacacccggctgtgatcgatatttatgaatacgacatcccgtttgcgaaacgttatctgatcgataagggcctgattccgatggaaggtgacgaagaactgaccatgctggcctttgatattgaaacgctgtatcacgaaggcgaagaattcggcaccggtccgatcctgatgatttcatacgcagatggttcggaagctcgcgtgatcacctggaaaaagattgatctgccgtatgttgacgtcgtgagcacggaaaaagaaatgatcaagcgctttctgcgtattgtgaaagaaaaggatccggacgttctgattacctataacggcgataattttgacttcgcatacctgaaaaagcgttgcgaaaaactgggtatcaagttcacgctgggccgcgacggttctgaaccgaaaattcagcgcatgggcgatcgttttgcggttgaagtcaaaggtcgtatccatttcgatctgtatccggttatccgtcgcaccattaacctgccgacctatacgctggaagcggtttacgaagccgtctttggcaaaccgaaggaaaaagtgtacgcggaagaaattgcacaggcttgggaatcaggcgaaggtctggaacgcgtggcccgttattcgatggaagatgcaaaagttacctacgaactgggtcgcgaatttttcccgatggaagcccagctgagccgtctgatcggccaaagcctgtgggatgtttctcgcagctctacgggtaacctggtcgaatggtttctgctgcgtaaagcgtatgaacgcaacgaaattgcgccgaataaaccggatgaacgtgaactggcacgtcgccgtggcggttatgcaggcggttacgttaaagaaccggaacgcggcctgtgggataatatcgtctatctggactttatgagtctgtacccgtccattatcattacccataacgttagtccggacacgttcaatcgtgaaggctgcaaagaatatgataccgccccgcaggttggtcacaagttttgtaaagacgtccaaggcttcattccgagtctgctgggtgccctgctggatgaacgccagaaaatcaagaaacgtatgaaggcatccattgatccgctggaaaagaaactgctggactatcgccaaaaggcgatcaaaattctggccaactcatattacggctattacggttatgcacgcgctcgttggtactgcaaagaatgtgcagaatcggtgaccgcttggggccgtgattatattgaaaccacgatccacgaaattgaagaacgctttggtttcaaagttctgtacgctgataccgacggctttttcgcgacgatcccgggtgcggatgccgaaaccgtgaagaaaaaggctaaggaattcctgaagtacatcaacgcgaaactgccgggcctgctggaactggaatatgaaggcttctacgtccgtggctttttcgtgaccaaaaagaaatacgcggttatcgacgaagaaggcaaaattaccacgcgcggtctggaaatcgtgcgccgtgattggagtgaaattgccaaagaaacccaggcaaaagttctggaagcaatcctgaaacatggtaatgtcgaagaagcagtgaaaattgtcaaggaagtgacggaaaaactgtcgaagtatgaaatcccgccggaaaaactggtgatctacgaacaaattacccgcccgctgcatgaatataaagcgattggcccgcacgtggcagttgctaaacgtctggcagcccgcggtgtcaaagtgcgtccgggcatggtgatcggttatattgttctgcgtggcgatggtccgatcagtaaacgcgcgattctggccgaagaatttgatccgcgcaaacacaagtacgacgccgaatattacatcgaaaaccaggtgctgccggctgttctgcgtattctggaagcgttcggctatcgtaaagaagatctgcgctggcagaaaaccaagcaaacgggtctgaccgcatggctgaatgtgaaaaagaaataa

SEQ ID NO: 84 - DNA, 2328 bp, Artificial Sequence
  Synthetic
atgattctggatacggactatattacggaaaatggcaagccggttattcgtgtgttcaaaaaggaaaatggcgaattcaagatcgaatatgatcgtacctttgaaccgtatttctacgctctgctgaaagatgacagcgcgatcgaagatgtcaaaaaggtgaccgccaaacgccatggcacggtggttcgcgtcaagcgtgcagaaaaagtgcagcgcaagtttctgggtcgtccgattgaagtttggaaactgtatttcacccatccgcaagatgtcccggcaatccgcgacaaaattcgtgcacacccggctgtgatcgatatttatgaatacgacatcccgtttgcgaaacgttatctgatcgataagggcctgattccgatggaaggtgacgaagaactgaccatgctggcctttgatattgaaacgctgtatcacgaaggcgaagaattcggcaccggtccgatcctgatgatttcatacgcagatggttcggaagctcgcgtgatcacctggaaaaagattgatctgccgtatgttgacgtcgtgagcacggaaaaagaaatgatcaagcgctttctgcgtattgtgaaagaaaaggatccggacgttctgattacctataacggcgataattttgacttcgcatacctgaaaaagcgttgcgaaaaactgggtatcaagttcacgctgggccgcgacggttctgaaccgaaaattcagcgcatgggcgatcgttttgcggttgaagtcaaaggtcgtatccatttcgatctgtatccggttatccgtcgcaccattaacctgccgacctatacgctggaagcggtttacgaagccgtctttggcaaaccgaaggaaaaagtgtacgcggaagaaattgcacaggcttgggaatcaggcgaaggtctggaacgcgtggcccgttattcgatggaagatgcaaaagttacctacgaactgggtcgcgaatttttcccgatggaagcccagctgagccgtctgatcggccaaagcctgtgggatgtttctcgcagctctacgggtaacctggtcgaatggtttctgctgcgtaaagcgtatgaacgcaacgaactggctccgaataagccggatgaacgcgaactggttcgtcgccgtaacagctataccggcggttacgtcaaagaaccggaacgcggcctgtgggataatatcgtttatctggactttcgtagtctgtacccgtccattatcattacccataacgtgtcaccggacacgctgaatcgtgaaggctgcaaagaatatgatgaagccccgcaagtgggtcacaagttctgtaaagactttccgggcttcattccgtcgctgctgggtaacctgctggatgaacgccagaaaatcaagaaacgtatgaaggcaaccattgatccgctggaaaagaaactgctggactatcgtcaacgcgctatcaaaattctggcgaattcttattacggctattacgcgtatgcgcgtgcgcgctggtactgcaaagaatgtgccgaaagtgtgaccgcatggggccgcgaatatattgaaatgtccatccgtgaaatcgaagaaaagtacggtttcaaggttctgtacgcggataccgacggtttccacgcaacgatcccgggtgccgatgcagaaaccgtgaagaaaaaggcgatggaattcctgaagtacatcaacgctaagctgccgggtgcgctggaactggaatatgaaggcttctacaaacgtggctttttcgtgacgaaaaagaaatacgccgttatcgacgaagaaggcaaaattaccacgcgcggtctggaaatcgtgcgccgtgattggagtgaaattgccaaagaaacccaggcacgcgttctggaagcaatcctgcgtcatggtgacgtcgaagaagccgttcgcattgtcaaagatgtgacggaaaagctgtcgaaatatgaagtcccgccggaaaaactggtgatccatgaacaaattacccgtgaactgaaggattacaaagcgacgggcccgcacgttgcaattgctaaacgcctggcagcccgtggcatcaagattcgtccgggtaccgttatcagctatattgtcctgaaaggctctggtcgcatcggtgatcgtgctattccgtttgatgaattcgacccgacgaaacaccgttacgatgccgaatattacatcgaaaatcaggtgctgccggccgttgaacgcattctgaaagcatttggctataagaaagaagaactgcgctaccagaaaacccgtcaagtgggcctgggtgcgtggctgaagctgaaaggtaagaaataa

SEQ ID NO: 85 - DNA, 2322 bp, Artificial Sequence
  Synthetic
atgattctggatacggactatattacggaaaatggcaagccggttattcgtgtgttcaaaaaggaaaatggcgaattcaagatcgaatatgatcgtacctttgaaccgtatttctacgctctgctgaaagatgacagcgcgatcgaagatgtcaaaaaggtgaccgccaaacgccatggcacggtggttcgcgtcaagcgtgcagaaaaagtgcagcgcaagtttctgggtcgtccgattgaagtttggaaactgtatttcacccatccgcaagatgtcccggcaatccgcgacaaaattcgtgcacacccggctgtgatcgatatttatgaatacgacatcccgtttgcgaaacgttatctgatcgataagggcctgattccgatggaaggtgacgaagaactgaccatgctggcctttgatattgaaacgctgtatcacgaaggcgaagaattcggcaccggtccgatcctgatgatttcatacgcagatggttcggaagctcgcgtgatcacctggaaaaagattgatctgccgtatgttgacgtcgtgagcacggaaaaagaaatgatcaagcgctttctgcgtattgtgaaagaaaaggatccggacgttctgattacctataacggcgataattttgacttcgcatacctgaaaaagcgttgcgaaaaactgggtatcaagttcacgctgggccgcgacggttctgaaccgaaaattcagcgcatgggcgatcgttttgcggttgaagtcaaaggtcgtatccatttcgatctgtatccggttatccgtcgcaccattaacctgccgacctatacgctggaagcggtttacgaagccgtctttggcaaaccgaaggaaaaagtgtacgcggaagaaattgcacaggcttgggaatcaggcgaaggtctggaacgcgtggcccgttattcgatggaagatgcaaaagttacctacgaactgggtcgcgaatttttcccgatggaagcccagctgagccgtctgatcggccaaagcctgtgggatgtttctcgcagctctacgggtaacctggtcgaatggtttctgctgcgtaaagcgtatgaacgcaacgaactggctccgaataagccggatgaacgcgaactggttcgtcgccgtaacagctataccggcggttacgtcaaagaaccggaacgcggcctgtgggataatatcgtttatctggactttcgtagtctgtacccgtccattatcattacccataacgtgtcaccggacacgctgaatcgtgaaggctgcaaagaatatgatgaagccccgcaagtgggtcacaagttctgtaaagactttccgggcttcattccgtcgctgctgggtaacctgctggatgaacgccagaaaatcaagaaacgtatgaaggcaaccattgatccgctggaaaagaaactgctggactatcgtcaacgcgctatcaaaattctggcgaattcttattacggctattacgcgtatgcgcgtgcgcgctggtactgcaaagaatgtgccgaaagtgtgaccgcatggggccgcgaatatattgaaatgtccatccgtgaaatcgaagaaaagtacggtttcaaggttctgtacgcggataccgacggtttccacgcaacgatcccgggtgccgatgcagaaaccgtgaagaaaaaggcgatggaattcctgaagtacatcaacgctaagctgccgggtgcgctggaactggaatatgaaggcttctacaaacgtggctttttcgtgacgaaaaagaaatacgccgttatcgacgaagaaggcaaaattaccacgcgcggtctggaaatcgtgcgccgtgattggagtgaaattgccaaagaaacccaggcacgtgtcctggaagcaatcctgaaacatggtgatgtggaagaagcggttcgcattgtcaaagaagtgacggaaaagctgtcgaaatatgaagttccgccggaaaaactggtcatccatgaacaaattacccgcgatctgcgtgactacaaagccacgggtccgcacgtggcagttgcaaaacgtctggcagcccgtggcgtgaagattcgtccgggtaccgtgatcagttatattgttctgaaaggctccggtcgcatcggtgaccgtgctattccgtttgatgaattcgacccgacgaaacaccgttacgatgccgaatattacatcgaaaatcaggtcctgccggccgtggaacgcattctgaaagcatttggttatcgcaaggaagatctgcgttaccagaagaccaaacaagtcggcctgggtgcgtggctgaaagtgaaaaagtaa

SEQ ID NO: 86 - DNA, 2328 bp, Artificial Sequence
  Synthetic
atgattctggatacggactatattacggaaaatggcaagccggttattcgtgtgttcaaaaaggaaaatggcgaattcaagatcgaatatgatcgtacctttgaaccgtatttctacgctctgctgaaagatgacagcgcgatcgaagatgtcaaaaaggtgaccgccaaacgccatggcacggtggttcgcgtcaagcgtgcagaaaaagtgcagcgcaagtttctgggtcgtccgattgaagtttggaaactgtatttcacccatccgcaagatgtcccggcaatccgcgacaaaattcgtgcacacccggctgtgatcgatatttatgaatacgacatcccgtttgcgaaacgttatctgatcgataagggcctgattccgatggaaggtgacgaagaactgaccatgctggcctttgatattgaaacgctgtatcacgaaggcgaagaattcggcaccggtccgatcctgatgatttcatacgcagatggttcggaagctcgcgtgatcacctggaaaaagattgatctgccgtatgttgacgtcgtgagcacggaaaaagaaatgatcaagcgctttctgcgtattgtgaaagaaaaggatccggacgttctgattacctataacggcgataattttgacttcgcatacctgaaaaagcgttgcgaaaaactgggtatcaagttcacgctgggccgcgacggttctgaaccgaaaattcagcgcatgggcgatcgttttgcggttgaagtcaaaggtcgtatccatttcgatctgtatccggttatccgtcgcaccattaacctgccgacctatacgctggaagcggtttacgaagccgtctttggcaaaccgaaggaaaaagtgtacgcggaagaaattgcacaggcttgggaatcaggcgaaggtctggaacgcgtggcccgttattcgatggaagatgcaaaagttacctacgaactgggtcgcgaatttttcccgatggaagcccagctgagccgtctgatcggccaaagcctgtgggatgtttctcgcagctctacgggtaacctggtcgaatggtttctgctgcgtaaagcgtatgaacgcaacgaactggctccgaataagccggatgaacgcgaactggttcgtcgccgtaacagctataccggcggttacgtcaaagaaccggaacgcggcctgtgggataatatcgtttatctggactttcgtagtctgtacccgtccattatcattacccataacgtgtcaccggacacgctgaatcgtgaaggctgcaaagaatatgatgaagccccgcaagtgggtcacaagttctgtaaagactttccgggcttcattccgtcgctgctgggtaacctgctggatgaacgccagaaaatcaagaaacgtatgaaggcaaccattgatccgctggaaaagaaactgctggactatcgtcaacgcgctatcaaaattctggcgaattcttattacggctattacgcgtatgcgcgtgcgcgctggtactgcaaagaatgtgccgaaagtgtgaccgcatggggccgcgaatatattgaaatgtccatccgtgaaatcgaagaaaagtacggtttcaaggttctgtacgcggataccgacggtttccacgcaacgatcccgggtgccgatgcagaaaccgtgaagaaaaaggcgatggaattcctgaagtacatcaacgctaagctgccgggtgcgctggaactggaatatgaaggcttctacaaacgtggctttttcgtgacgaaaaagaaatacgccgttatcgacgaagaaggcaaaattaccacgcgcggtctggaaatcgtgcgccgtgattggagtgaaattgccaaagaaacccaggcacgtgtgctggaagctctgctgaaagatggcaatgttgaagaagcggtttccattgtcaaagaagtgacggaaaagctgggtaaatatgaagtcccgccggaaaaactggtgatccatgaacaaattacccgcgaactgaaggattacaaagcgacgggcccgcacgttgctatcgcgaaacgtctggcagcgcgtggcgtgaagattcgtccgggtaccgttatcagctatattgtcctgaaaggctctggtcgtatcggtgaccgcgcgattccgtttgatgaattcgacccgacgaaacatcgctacgatgcagaatattacatcgaaaaccaggttctgccggctgtcgaacgtattctgaaagcgtttggctatcgtgccgaagatctgcgctaccagaaaacccgtcaagtgggcctgggtgtttggctgcaaccgaaaggtaagaaataa

SEQ ID NO: 87 - DNA, 2325 bp, Artificial Sequence
  Synthetic
atgattctggatacggactatattacggaaaatggcaagccggttattcgtgtgttcaaaaaggaaaatggcgaattcaagatcgaatatgatcgtacctttgaaccgtatttctacgctctgctgaaagatgacagcgcgatcgaagatgtcaaaaaggtgaccgccaaacgccatggcacggtggttcgcgtcaagcgtgcagaaaaagtgcagcgcaagtttctgggtcgtccgattgaagtttggaaactgtatttcacccatccgcaagatgtcccggcaatccgcgacaaaattcgtgcacacccggctgtgatcgatatttatgaatacgacatcccgtttgcgaaacgttatctgatcgataagggcctgattccgatggaaggtgacgaagaactgaccatgctggcctttgatattgaaacgctgtatcacgaaggcgaagaattcggcaccggtccgatcctgatgatttcatacgcagatggttcggaagctcgcgtgatcacctggaaaaagattgatctgccgtatgttgacgtcgtgagcacggaaaaagaaatgatcaagcgctttctgcgtattgtgaaagaaaaggatccggacgttctgattacctataacggcgataattttgacttcgcatacctgaaaaagcgttgcgaaaaactgggtatcaagttcacgctgggccgcgacggttctgaaccgaaaattcagcgcatgggcgatcgttttgcggttgaagtcaaaggtcgtatccatttcgatctgtatccggttatccgtcgcaccattaacctgccgacctatacgctggaagcggtttacgaagccgtctttggcaaaccgaaggaaaaagtgtacgcggaagaaattgcacaggcttgggaatcaggcgaaggtctggaacgcgtggcccgttattcgatggaagatgcaaaagttacctacgaactgggtcgcgaatttttcccgatggaagcccagctgagccgtctgatcggccaaagcctgtgggatgtttctcgcagctctacgggtaacctggtcgaatggtttctgctgcgtaaagcgtatgaacgcaacgaactggctccgaataagccggatgaacgcgaactggttcgtcgccgtaacagctataccggcggttacgtcaaagaaccggaacgcggcctgtgggataatatcgtttatctggactttcgtagtctgtacccgtccattatcattacccataacgtgtcaccggacacgctgaatcgtgaaggctgcaaagaatatgatgaagccccgcaagtgggtcacaagttctgtaaagactttccgggcttcattccgtcgctgctgggtaacctgctggatgaacgccagaaaatcaagaaacgtatgaaggcaaccattgatccgctggaaaagaaactgctggactatcgtcaacgcgctatcaaaattctggcgaattcttattacggctattacgcgtatgcgcgtgcgcgctggtactgcaaagaatgtgccgaaagtgtgaccgcatggggccgcgaatatattgaaatgtccatccgtgaaatcgaagaaaagtacggtttcaaggttctgtacgcggataccgacggtttccacgcaacgatcccgggtgccgatgcagaaaccgtgaagaaaaaggcgatggaattcctgaagtacatcaacgctaagctgccgggtgcgctggaactggaatatgaaggcttctacaaacgtggctttttcgtgacgaaaaagaaatacgccgttatcgacgaagaaggcaaaattaccacgcgcggtctggaaatcgtgcgccgtgattggagtgaaattgccaaagaaacccaggcaaaggttctggaagcaattctgaaacatggtaacgtcgaagaagcggtcaagatcgtgaaagaagttaccgaaaaactgtcgaattatgaaattccggtcgaaaagctggtgatctacgaacaaattacgcgcccgctgaacgaatataaagccattggcccgcacgtggcagttgctaaacgtctggcggccaagggtatcaagattaaaccgggcatggtgattggttatgttgtcctgcgcggcgatggtccgatcagcaaacgtgcgatcgccatcgaagaattcgatggcaaaaagcataagtacgacgcagaatactacatcgaaaatcaggttctgccggccgtcgaacgtatcctgaaagcattcggttataagcgtgaagatctgcgctggcagaagaccaaacaagtgggcctgggtgcgtggctgaaagttaaaaagtcttaa

SEQ ID NO: 88 - DNA, 2328 bp, Artificial Sequence
  Synthetic
atgattctggatacggactatattacggaaaatggcaagccggttattcgtgtgttcaaaaaggaaaatggcgaattcaagatcgaatatgatcgtacctttgaaccgtatttctacgctctgctgaaagatgacagcgcgatcgaagatgtcaaaaaggtgaccgccaaacgccatggcacggtggttcgcgtcaagcgtgcagaaaaagtgcagcgcaagtttctgggtcgtccgattgaagtttggaaactgtatttcacccatccgcaagatgtcccggcaatccgcgacaaaattcgtgcacacccggctgtgatcgatatttatgaatacgacatcccgtttgcgaaacgttatctgatcgataagggcctgattccgatggaaggtgacgaagaactgaccatgctggcctttgatattgaaacgctgtatcacgaaggcgaagaattcggcaccggtccgatcctgatgatttcatacgcagatggttcggaagctcgcgtgatcacctggaaaaagattgatctgccgtatgttgacgtcgtgagcacggaaaaagaaatgatcaagcgctttctgcgtattgtgaaagaaaaggatccggacgttctgattacctataacggcgataattttgacttcgcatacctgaaaaagcgttgcgaaaaactgggtatcaagttcacgctgggccgcgacggttctgaaccgaaaattcagcgcatgggcgatcgttttgcggttgaagtcaaaggtcgtatccatttcgatctgtatccggttatccgtcgcaccattaacctgccgacctatacgctggaagcggtttacgaagccgtctttggcaaaccgaaggaaaaagtgtacgcggaagaaattgcacaggcttgggaatcaggcgaaggtctggaacgcgtggcccgttattcgatggaagatgcaaaagttacctacgaactgggtcgcgaatttttcccgatggaagcccagctgagccgtctgatcggccaaagcctgtgggatgtttctcgcagctctacgggtaacctggtcgaatggtttctgctgcgtaaagcgtatgaacgcaacgaactggctccgaataagccggatgaacgcgaactggttcgtcgccgtaacagctataccggcggttacgtcaaagaaccggaacgcggcctgtgggataatatcgtttatctggactttcgtagtctgtacccgtccattatcattacccataacgtgtcaccggacacgctgaatcgtgaaggctgcaaagaatatgatgaagccccgcaagtgggtcacaagttctgtaaagactttccgggcttcattccgtcgctgctgggtaacctgctggatgaacgccagaaaatcaagaaacgtatgaaggcaaccattgatccgctggaaaagaaactgctggactatcgtcaacgcgctatcaaaattctggcgaattcttattacggctattacgcgtatgcgcgtgcgcgctggtactgcaaagaatgtgccgaaagtgtgaccgcatggggccgcgaatatattgaaatgtccatccgtgaaatcgaagaaaagtacggtttcaaggttctgtacgcggataccgacggtttccacgcaacgatcccgggtgccgatgcagaaaccgtgaagaaaaaggcgatggaattcctgaagtacatcaacgctaagctgccgggtgcgctggaactggaatatgaaggcttctacaaacgtggctttttcgtgacgaaaaagaaatacgccgttatcgacgaagaaggcaaaattaccacgcgcggtctggaaatcgtgcgccgtgattggagtgaaattgccaaagaaacccaggcacgtgttctggaagcactgctgaaagatggtaatgtcgaagaagcagtgagtattgttaaagaagtcacggaaaaactgtccaagtatgaagtcccgccggaaaaactggtgattcatgaacaaatcacccgcgaactgaaagattacaaggcgacgggcccgcacgtggcaattgctaaacgtctggcagcgcgtggcgttaagatccgtccgggtaccgttattagctatatcgtcctgaaaggctctggtcgtattggtgaccgcgccatcccgtttgatgaattcgacccggctaaacaccgctacgatgcggaatattacattgaaaatcaggtcctgccggctgtggaacgtatcctgaaagcgtttggctatcgtaaggaagatctgcgctaccagaaaacccgtcaagtgggcctgggtgcgtggctgaaaccgaagggtaaaaagtaa

SEQ ID NO: 89 - DNA, 2328 bp, Artificial Sequence
  Synthetic
atgattctggatacggactatattacggaaaatggcaagccggttattcgtgtgttcaaaaaggaaaatggcgaattcaagatcgaatatgatcgtacctttgaaccgtatttctacgctctgctgaaagatgacagcgcgatcgaagatgtcaaaaaggtgaccgccaaacgccatggcacggtggttcgcgtcaagcgtgcagaaaaagtgcagcgcaagtttctgggtcgtccgattgaagtttggaaactgtatttcacccatccgcaagatgtcccggcaatccgcgacaaaattcgtgcacacccggctgtgatcgatatttatgaatacgacatcccgtttgcgaaacgttatctgatcgataagggcctgattccgatggaaggtgacgaagaactgaccatgctggcctttgatattgaaacgctgtatcacgaaggcgaagaattcggcaccggtccgatcctgatgatttcatacgcagatggttcggaagctcgcgtgatcacctggaaaaagattgatctgccgtatgttgacgtcgtgagcacggaaaaagaaatgatcaagcgctttctgcgtattgtgaaagaaaaggatccggacgttctgattacctataacggcgataattttgacttcgcatacctgaaaaagcgttgcgaaaaactgggtatcaagttcacgctgggccgcgacggttctgaaccgaaaattcagcgcatgggcgatcgttttgcggttgaagtcaaaggtcgtatccatttcgatctgtatccggttatccgtcgcaccattaacctgccgacctatacgctggaagcggtttacgaagccgtctttggcaaaccgaaggaaaaagtgtacgcggaagaaattgcacaggcttgggaatcaggcgaaggtctggaacgcgtggcccgttattcgatggaagatgcaaaagttacctacgaactgggtcgcgaatttttcccgatggaagcccagctgagccgtctgatcggccaaagcctgtgggatgtttctcgcagctctacgggtaacctggtcgaatggtttctgctgcgtaaagcgtatgaacgcaacgaactggctccgaataagccggatgaacgcgaactggttcgtcgccgtaacagctataccggcggttacgtcaaagaaccggaacgcggcctgtgggataatatcgtttatctggactttcgtagtctgtacccgtccattatcattacccataacgtgtcaccggacacgctgaatcgtgaaggctgcaaagaatatgatgaagccccgcaagtgggtcacaagttctgtaaagactttccgggcttcattccgtcgctgctgggtaacctgctggatgaacgccagaaaatcaagaaacgtatgaaggcaaccattgatccgctggaaaagaaactgctggactatcgtcaacgcgctatcaaaattctggcgaattcttattacggctattacgcgtatgcgcgtgcgcgctggtactgcaaagaatgtgccgaaagtgtgaccgcatggggccgcgaatatattgaaatgtccatccgtgaaatcgaagaaaagtacggtttcaaggttctgtacgcggataccgacggtttccacgcaacgatcccgggtgccgatgcagaaaccgtgaagaaaaaggcgatggaattcctgaagtacatcaacgctaagctgccgggtgcgctggaactggaatatgaaggcttctacaaacgtggctttttcgtgacgaaaaagaaatacgccgttatcgacgaagaaggcaaaattaccacgcgcggtctggaaatcgtgcgccgtgattggagtgaaattgccaaagaaacccaggcacgcgtcctggaagcaatcctgaaagatggtgacgtggaagaagccgtccgtattgtgaaagaagttacggaaaaactgtccaaatatgaagttccgccggaaaaactggtcatccatgaacaaattacccgcgaactgaaagattacaaagcgacgggcccgcacgtcgcaatcgctaaacgtctggcggcgcgtggcgtgaaaattcgtccgggtaccgtgatctcatatattgttctgaaaggctcgggtcgtatcggtgaccgcgctattccgtttgatgaattcgacccgaaaaaacacaaatacgatgcggaatactacatcgaaaaccaggttctgccggccgtcgaacgtattctgcgcgcatttggctaccgtaaagaagatctgcgttatcaaaaaaccaaacaagtgggtctgggtgcgtggctgaaaccgaaaggtaaaaaataa

SEQ ID NO: 90 - DNA, 2325 bp, Artificial Sequence
  Synthetic
atgattctggatacggactatattacggaaaatggcaagccggttattcgtgtgttcaaaaaggaaaatggcgaattcaagatcgaatatgatcgtacctttgaaccgtatttctacgctctgctgaaagatgacagcgcgatcgaagatgtcaaaaaggtgaccgccaaacgccatggcacggtggttcgcgtcaagcgtgcagaaaaagtgcagcgcaagtttctgggtcgtccgattgaagtttggaaactgtatttcacccatccgcaagatgtcccggcaatccgcgacaaaattcgtgcacacccggctgtgatcgatatttatgaatacgacatcccgtttgcgaaacgttatctgatcgataagggcctgattccgatggaaggtgacgaagaactgaccatgctggcctttgatattgaaacgctgtatcacgaaggcgaagaattcggcaccggtccgatcctgatgatttcatacgcagatggttcggaagctcgcgtgatcacctggaaaaagattgatctgccgtatgttgacgtcgtgagcacggaaaaagaaatgatcaagcgctttctgcgtattgtgaaagaaaaggatccggacgttctgattacctataacggcgataattttgacttcgcatacctgaaaaagcgttgcgaaaaactgggtatcaagttcacgctgggccgcgacggttctgaaccgaaaattcagcgcatgggcgatcgttttgcggttgaagtcaaaggtcgtatccatttcgatctgtatccggttatccgtcgcaccattaacctgccgacctatacgctggaagcggtttacgaagccgtctttggcaaaccgaaggaaaaagtgtacgcggaagaaattgcacaggcttgggaatcaggcgaaggtctggaacgcgtggcccgttattcgatggaagatgcaaaagttacctacgaactgggtcgcgaatttttcccgatggaagcccagctgagccgtctgatcggccaaagcctgtgggatgtttctcgcagctctacgggtaacctggtcgaatggtttctgctgcgtaaagcgtatgaacgcaacgaactggctccgaataagccggatgaacgcgaactggttcgtcgccgtaacagctataccggcggttacgtcaaagaaccggaacgcggcctgtgggataatatcgtttatctggactttcgtagtctgtacccgtccattatcattacccataacgtgtcaccggacacgctgaatcgtgaaggctgcaaagaatatgatgaagccccgcaagtgggtcacaagttctgtaaagactttccgggcttcattccgtcgctgctgggtaacctgctggatgaacgccagaaaatcaagaaacgtatgaaggcaaccattgatccgctggaaaagaaactgctggactatcgtcaacgcgctatcaaaattctggcgaattcttattacggctattacgcgtatgcgcgtgcgcgctggtactgcaaagaatgtgccgaaagtgtgaccgcatggggccgcgaatatattgaaatgtccatccgtgaaatcgaagaaaagtacggtttcaaggttctgtacgcggataccgacggtttccacgcaacgatcccgggtgccgatgcagaaaccgtgaagaaaaaggcgatggaattcctgaagtacatcaacgctaagctgccgggtgcgctggaactggaatatgaaggcttctacaaacgtggctttttcgtgacgaaaaagaaatacgccgttatcgacgaagaaggcaaaattaccacgcgcggtctggaaatcgtgcgccgtgattggagtgaaattgccaaagaaacccaggcacgtgttctggaagcaattctgaaacatggtaacgtcgaagaagcggtcaaaatcgtgaaagaagttacggaaaaactgtctaactacgaaattccgccggaaaaactggccatctacgaacaaattacccgcccgctgcatgaatataaagcaatcggtccgcacgtcgcagtggcaaaacgtctggcagcacgcggcgttaaagtcaaaccgggtatggtcatcggctatattgtgctgcgtggtgatggcccgatcagcaaccgcgcaattctggctgaagaatacgatctgaaaaaacacaaatacgacgccgaatattacatcgaaaatcaggttctgccggctgtcctgcgtattctggaagcgtttggctatcgtaaagaagatctgcgctggcagaaaacccgtcaaacgggtctgacctcatggctgaatattaaaaaatcgtaa

SEQ ID NO: 91 - DNA, 2325 bp, Artificial Sequence
  Synthetic
atgattctggatacggactatattacggaaaatggcaagccggttattcgtgtgttcaaaaaggaaaatggcgaattcaagatcgaatatgatcgtacctttgaaccgtatttctacgctctgctgaaagatgacagcgcgatcgaagatgtcaaaaaggtgaccgccaaacgccatggcacggtggttcgcgtcaagcgtgcagaaaaagtgcagcgcaagtttctgggtcgtccgattgaagtttggaaactgtatttcacccatccgcaagatgtcccggcaatccgcgacaaaattcgtgcacacccggctgtgatcgatatttatgaatacgacatcccgtttgcgaaacgttatctgatcgataagggcctgattccgatggaaggtgacgaagaactgaccatgctggcctttgatattgaaacgctgtatcacgaaggcgaagaattcggcaccggtccgatcctgatgatttcatacgcagatggttcggaagctcgcgtgatcacctggaaaaagattgatctgccgtatgttgacgtcgtgagcacggaaaaagaaatgatcaagcgctttctgcgtattgtgaaagaaaaggatccggacgttctgattacctataacggcgataattttgacttcgcatacctgaaaaagcgttgcgaaaaactgggtatcaagttcacgctgggccgcgacggttctgaaccgaaaattcagcgcatgggcgatcgttttgcggttgaagtcaaaggtcgtatccatttcgatctgtatccggttatccgtcgcaccattaacctgccgacctatacgctggaagcggtttacgaagccgtctttggcaaaccgaaggaaaaagtgtacgcggaagaaattgcacaggcttgggaatcaggcgaaggtctggaacgcgtggcccgttattcgatggaagatgcaaaagttacctacgaactgggtcgcgaatttttcccgatggaagcccagctgagccgtctgatcggccaaagcctgtgggatgtttctcgcagctctacgggtaacctggtcgaatggtttctgctgcgtaaagcgtatgaacgcaacgaactggctccgaataagccggatgaacgcgaactggttcgtcgccgtaacagctataccggcggttacgtcaaagaaccggaacgcggcctgtgggataatatcgtttatctggactttcgtagtctgtacccgtccattatcattacccataacgtgtcaccggacacgctgaatcgtgaaggctgcaaagaatatgatgaagccccgcaagtgggtcacaagttctgtaaagactttccgggcttcattccgtcgctgctgggtaacctgctggatgaacgccagaaaatcaagaaacgtatgaaggcaaccattgatccgctggaaaagaaactgctggactatcgtcaacgcgctatcaaaattctggcgaattcttattacggctattacgcgtatgcgcgtgcgcgctggtactgcaaagaatgtgccgaaagtgtgaccgcatggggccgcgaatatattgaaatgtccatccgtgaaatcgaagaaaagtacggtttcaaggttctgtacgcggataccgacggtttccacgcaacgatcccgggtgccgatgcagaaaccgtgaagaaaaaggcgatggaattcctgaagtacatcaacgctaagctgccgggtgcgctggaactggaatatgaaggcttctacaaacgtggctttttcgtgacgaaaaagaaatacgccgttatcgacgaagaaggcaaaattaccacgcgcggtctggaaatcgtgcgccgtgattggagtgaaattgccaaagaaacccaggcaaaagttctggaagcaatcctgaaacatggtaatgtcgaagaagcagtgaaaattgtcaaggaagtgacggaaaaactgtcgaagtatgaaatcccgccggaaaaactggtgatctacgaacaaattacccgcccgctgcatgaatataaagcgattggcccgcacgtggcagttgctaaacgtctggcagcccgcggtgtcaaagtgcgtccgggcatggtgatcggttatattgttctgcgtggcgatggtccgatcagtaaacgcgcgattctggccgaagaatttgatccgcgcaaacacaagtacgacgccgaatattacatcgaaaaccaggtgctgccggctgttctgcgtattctggaagcgttcggctatcgtaaagaagatctgcgctggcagaaaaccaagcaaacgggtctgaccgcatggctgaatgtgaaaaagaaataa

SEQ ID NO: 92 - DNA, 2328 bp, Artificial Sequence
  Synthetic
atgattctggacacggactatattacggaagatggcaagccggttatccgcattttcaagaaggaaaatggcgaattcaagatcgaatatgatcgtgaatttgaaccgtatatctacgctctgctgaaagatgacagcgcgatcgaagaagtgaaaaagattaccgctggccgccatggtcgtgtggttaaggtgaaacgcgcggaaaaagttaaaaagaaatttctgggccgtccgattgaagtgtggaaactgtatttcacccatccgcaggatgttccggccatccgtgacgaaattcgtcgccacagcgcagtcgtggatatctatgaatacgacattccgtttgcgaaacgctatctgatcgataagggcctgattccgatggaaggtgacgaagaactgaagatgatgagcttcgatatcgaaaccctgtatcacgaaggcgaagaattcggcacgggtccgatcctgatgatttcttacgcagacgaaggtgaagctcgtgtcatcacctggaagaaaattgatctgccgtatgtggaagttgtcagcacggaaaaggaaatgatcaaacgctttctgaaggtggttaaggaaaaagatccggacgtgctgattacctataacggtgataattttgacttcgcatacctgaagaaacgttgcgaaaaaatcggcattaagttcacgctgcgtcgcgacggttctgaaccgaaaatccagcgcatgggcgatcgttttgcggtcgaagtgaaaggtcgcattcatttcgatctgtatccggttatccgtcgcaccattaacctgccgacctatacgctggaagcggtttacgaagccgtctttggcaccccgaaggaaaaagtgtacccggaagaaattaccacggcctgggaaacgggcgaaggtctggaacgcgtcgcccgttatagtatggaagatgcaaaagtgacctacgaactgggtcgcgaatttttcccgatggaagcacagctgtcccgtctgatcggccaatcactgtgggatgtgtcgcgcagctctacgggtaacctggttgaatggttcctgctgcgtaaagcgtatgaacgcaacgaactggcaccgaataaaccgtccggccgcgaatacgatgaacgtcgcggcggttatgcgggcggttacgttaaagaaccggaaaagggtctgtgggaaaacatcgtctacctggattacaagagtctgtatccgtccattatcattacccataacgttagtccggacacgctgaatcgcgaaggctgcaaagaatacgatgtggcgccgcaggttggtcaccgtttttgtaaagactttccgggcttcattccgtccctgctgggtgatctgctggaagaacgtcagaaaatcaagcgcaaaatgaaggccaccattgatccgatcgaacgtcgcctgctggactatcgtcaacgcgcgatcaaaattctggccaacagctattacggctattacggttatgcgcgtgcccgctggtactgcaaagaatgtgcagaaagcgttacggcttggggccgcgaatacatcgaaatgtctatccgtgaaatcgaagaaaagtacggtttcaaggtgctgtacgctgataccgacggcttccatgcgacgattccgggtgaagatgccgaaaccatcaaaaagaaagcaatggaattcctgaagtacatcaactcaaagctgccgggcgccctggaactggaatatgaaggcttctaccgtcgcggctttttcgttacgaagaaaaagtacgcagtcattgacgaagaaggcaaaatcaccacgcgcggtctggaaattgtgcgtcgcgattggagtgaaattgccaaagaaacccaggcacgcgttctggaagcaatcctgcgtcatggtgacgtcgaagaagccgttcgcattgtcaaagatgtgacggaaaagctgtcgaaatatgaagtcccgccggaaaaactggtgatccatgaacaaattacccgtgaactgaaggattacaaagcgacgggcccgcacgttgcaattgctaaacgcctggcagcccgtggcatcaagattcgtccgggtaccgttatcagctatattgtcctgaaaggctctggtcgcatcggtgatcgtgctattccgtttgatgaattcgacccgacgaaacaccgttacgatgccgaatattacatcgaaaatcaggtgctgccggccgttgaacgcattctgaaagcatttggctataagaaagaagaactgcgctaccagaaaacccgtcaagtgggcctgggtgcgtggctgaagctgaaaggtaagaaataa

SEQ ID NO: 93 - DNA, 2322 bp, Artificial Sequence
  Synthetic
atgattctggacacggactatattacggaagatggcaagccggttatccgcattttcaagaaggaaaatggcgaattcaagatcgaatatgatcgtgaatttgaaccgtatatctacgctctgctgaaagatgacagcgcgatcgaagaagtgaaaaagattaccgctggccgccatggtcgtgtggttaaggtgaaacgcgcggaaaaagttaaaaagaaatttctgggccgtccgattgaagtgtggaaactgtatttcacccatccgcaggatgttccggccatccgtgacgaaattcgtcgccacagcgcagtcgtggatatctatgaatacgacattccgtttgcgaaacgctatctgatcgataagggcctgattccgatggaaggtgacgaagaactgaagatgatgagcttcgatatcgaaaccctgtatcacgaaggcgaagaattcggcacgggtccgatcctgatgatttcttacgcagacgaaggtgaagctcgtgtcatcacctggaagaaaattgatctgccgtatgtggaagttgtcagcacggaaaaggaaatgatcaaacgctttctgaaggtggttaaggaaaaagatccggacgtgctgattacctataacggtgataattttgacttcgcatacctgaagaaacgttgcgaaaaaatcggcattaagttcacgctgcgtcgcgacggttctgaaccgaaaatccagcgcatgggcgatcgttttgcggtcgaagtgaaaggtcgcattcatttcgatctgtatccggttatccgtcgcaccattaacctgccgacctatacgctggaagcggtttacgaagccgtctttggcaccccgaaggaaaaagtgtacccggaagaaattaccacggcctgggaaacgggcgaaggtctggaacgcgtcgcccgttatagtatggaagatgcaaaagtgacctacgaactgggtcgcgaatttttcccgatggaagcacagctgtcccgtctgatcggccaatcactgtgggatgtgtcgcgcagctctacgggtaacctggttgaatggttcctgctgcgtaaagcgtatgaacgcaacgaactggcaccgaataaaccgtccggccgcgaatacgatgaacgtcgcggcggttatgcgggcggttacgttaaagaaccggaaaagggtctgtgggaaaacatcgtctacctggattacaagagtctgtatccgtccattatcattacccataacgttagtccggacacgctgaatcgcgaaggctgcaaagaatacgatgtggcgccgcaggttggtcaccgtttttgtaaagactttccgggcttcattccgtccctgctgggtgatctgctggaagaacgtcagaaaatcaagcgcaaaatgaaggccaccattgatccgatcgaacgtcgcctgctggactatcgtcaacgcgcgatcaaaattctggccaacagctattacggctattacggttatgcgcgtgcccgctggtactgcaaagaatgtgcagaaagcgttacggcttggggccgcgaatacatcgaaatgtctatccgtgaaatcgaagaaaagtacggtttcaaggtgctgtacgctgataccgacggcttccatgcgacgattccgggtgaagatgccgaaaccatcaaaaagaaagcaatggaattcctgaagtacatcaactcaaagctgccgggcgccctggaactggaatatgaaggcttctaccgtcgcggctttttcgttacgaagaaaaagtacgcagtcattgacgaagaaggcaaaatcaccacgcgcggtctggaaattgtgcgtcgcgattggagtgaaattgccaaagaaacccaggcacgtgtcctggaagcaatcctgaaacatggtgatgtggaagaagcggttcgcattgtcaaagaagtgacggaaaagctgtcgaaatatgaagttccgccggaaaaactggtcatccatgaacaaattacccgcgatctgcgtgactacaaagccacgggtccgcacgtggcagttgcaaaacgtctggcagcccgtggcgtgaagattcgtccgggtaccgtgatcagttatattgttctgaaaggctccggtcgcatcggtgaccgtgctattccgtttgatgaattcgacccgacgaaacaccgttacgatgccgaatattacatcgaaaatcaggtcctgccggccgtggaacgcattctgaaagcatttggttatcgcaaggaagatctgcgttaccagaagaccaaacaagtcggcctgggtgcgtggctgaaagtgaaaaagtaa

SEQ ID NO: 94 - DNA, 2328 bp, Artificial Sequence
  Synthetic
atgattctggacacggactatattacggaagatggcaagccggttatccgcattttcaagaaggaaaatggcgaattcaagatcgaatatgatcgtgaatttgaaccgtatatctacgctctgctgaaagatgacagcgcgatcgaagaagtgaaaaagattaccgctggccgccatggtcgtgtggttaaggtgaaacgcgcggaaaaagttaaaaagaaatttctgggccgtccgattgaagtgtggaaactgtatttcacccatccgcaggatgttccggccatccgtgacgaaattcgtcgccacagcgcagtcgtggatatctatgaatacgacattccgtttgcgaaacgctatctgatcgataagggcctgattccgatggaaggtgacgaagaactgaagatgatgagcttcgatatcgaaaccctgtatcacgaaggcgaagaattcggcacgggtccgatcctgatgatttcttacgcagacgaaggtgaagctcgtgtcatcacctggaagaaaattgatctgccgtatgtggaagttgtcagcacggaaaaggaaatgatcaaacgctttctgaaggtggttaaggaaaaagatccggacgtgctgattacctataacggtgataattttgacttcgcatacctgaagaaacgttgcgaaaaaatcggcattaagttcacgctgcgtcgcgacggttctgaaccgaaaatccagcgcatgggcgatcgttttgcggtcgaagtgaaaggtcgcattcatttcgatctgtatccggttatccgtcgcaccattaacctgccgacctatacgctggaagcggtttacgaagccgtctttggcaccccgaaggaaaaagtgtacccggaagaaattaccacggcctgggaaacgggcgaaggtctggaacgcgtcgcccgttatagtatggaagatgcaaaagtgacctacgaactgggtcgcgaatttttcccgatggaagcacagctgtcccgtctgatcggccaatcactgtgggatgtgtcgcgcagctctacgggtaacctggttgaatggttcctgctgcgtaaagcgtatgaacgcaacgaactggcaccgaataaaccgtccggccgcgaatacgatgaacgtcgcggcggttatgcgggcggttacgttaaagaaccggaaaagggtctgtgggaaaacatcgtctacctggattacaagagtctgtatccgtccattatcattacccataacgttagtccggacacgctgaatcgcgaaggctgcaaagaatacgatgtggcgccgcaggttggtcaccgtttttgtaaagactttccgggcttcattccgtccctgctgggtgatctgctggaagaacgtcagaaaatcaagcgcaaaatgaaggccaccattgatccgatcgaacgtcgcctgctggactatcgtcaacgcgcgatcaaaattctggccaacagctattacggctattacggttatgcgcgtgcccgctggtactgcaaagaatgtgcagaaagcgttacggcttggggccgcgaatacatcgaaatgtctatccgtgaaatcgaagaaaagtacggtttcaaggtgctgtacgctgataccgacggcttccatgcgacgattccgggtgaagatgccgaaaccatcaaaaagaaagcaatggaattcctgaagtacatcaactcaaagctgccgggcgccctggaactggaatatgaaggcttctaccgtcgcggctttttcgttacgaagaaaaagtacgcagtcattgacgaagaaggcaaaatcaccacgcgcggtctggaaattgtgcgtcgcgattggagtgaaattgccaaagaaacccaggcacgtgtgctggaagctctgctgaaagatggcaatgttgaagaagcggtttccattgtcaaagaagtgacggaaaagctgggtaaatatgaagtcccgccggaaaaactggtgatccatgaacaaattacccgcgaactgaaggattacaaagcgacgggcccgcacgttgctatcgcgaaacgtctggcagcgcgtggcgtgaagattcgtccgggtaccgttatcagctatattgtcctgaaaggctctggtcgtatcggtgaccgcgcgattccgtttgatgaattcgacccgacgaaacatcgctacgatgcagaatattacatcgaaaaccaggttctgccggctgtcgaacgtattctgaaagcgtttggctatcgtgccgaagatctgcgctaccagaaaacccgtcaagtgggcctgggtgtttggctgcaaccgaaaggtaagaaataa

SEQ ID NO: 95 - DNA, 2325 bp, Artificial Sequence
  Synthetic
atgattctggacacggactatattacggaagatggcaagccggttatccgcattttcaagaaggaaaatggcgaattcaagatcgaatatgatcgtgaatttgaaccgtatatctacgctctgctgaaagatgacagcgcgatcgaagaagtgaaaaagattaccgctggccgccatggtcgtgtggttaaggtgaaacgcgcggaaaaagttaaaaagaaatttctgggccgtccgattgaagtgtggaaactgtatttcacccatccgcaggatgttccggccatccgtgacgaaattcgtcgccacagcgcagtcgtggatatctatgaatacgacattccgtttgcgaaacgctatctgatcgataagggcctgattccgatggaaggtgacgaagaactgaagatgatgagcttcgatatcgaaaccctgtatcacgaaggcgaagaattcggcacgggtccgatcctgatgatttcttacgcagacgaaggtgaagctcgtgtcatcacctggaagaaaattgatctgccgtatgtggaagttgtcagcacggaaaaggaaatgatcaaacgctttctgaaggtggttaaggaaaaagatccggacgtgctgattacctataacggtgataattttgacttcgcatacctgaagaaacgttgcgaaaaaatcggcattaagttcacgctgcgtcgcgacggttctgaaccgaaaatccagcgcatgggcgatcgttttgcggtcgaagtgaaaggtcgcattcatttcgatctgtatccggttatccgtcgcaccattaacctgccgacctatacgctggaagcggtttacgaagccgtctttggcaccccgaaggaaaaagtgtacccggaagaaattaccacggcctgggaaacgggcgaaggtctggaacgcgtcgcccgttatagtatggaagatgcaaaagtgacctacgaactgggtcgcgaatttttcccgatggaagcacagctgtcccgtctgatcggccaatcactgtgggatgtgtcgcgcagctctacgggtaacctggttgaatggttcctgctgcgtaaagcgtatgaacgcaacgaactggcaccgaataaaccgtccggccgcgaatacgatgaacgtcgcggcggttatgcgggcggttacgttaaagaaccggaaaagggtctgtgggaaaacatcgtctacctggattacaagagtctgtatccgtccattatcattacccataacgttagtccggacacgctgaatcgcgaaggctgcaaagaatacgatgtggcgccgcaggttggtcaccgtttttgtaaagactttccgggcttcattccgtccctgctgggtgatctgctggaagaacgtcagaaaatcaagcgcaaaatgaaggccaccattgatccgatcgaacgtcgcctgctggactatcgtcaacgcgcgatcaaaattctggccaacagctattacggctattacggttatgcgcgtgcccgctggtactgcaaagaatgtgcagaaagcgttacggcttggggccgcgaatacatcgaaatgtctatccgtgaaatcgaagaaaagtacggtttcaaggtgctgtacgctgataccgacggcttccatgcgacgattccgggtgaagatgccgaaaccatcaaaaagaaagcaatggaattcctgaagtacatcaactcaaagctgccgggcgccctggaactggaatatgaaggcttctaccgtcgcggctttttcgttacgaagaaaaagtacgcagtcattgacgaagaaggcaaaatcaccacgcgcggtctggaaattgtgcgtcgcgattggagtgaaattgccaaagaaacccaggcaaaggttctggaagcaattctgaaacatggtaacgtcgaagaagcggtcaagatcgtgaaagaagttaccgaaaaactgtcgaattatgaaattccggtcgaaaagctggtgatctacgaacaaattacgcgcccgctgaacgaatataaagccattggcccgcacgtggcagttgctaaacgtctggcggccaagggtatcaagattaaaccgggcatggtgattggttatgttgtcctgcgcggcgatggtccgatcagcaaacgtgcgatcgccatcgaagaattcgatggcaaaaagcataagtacgacgcagaatactacatcgaaaatcaggttctgccggccgtcgaacgtatcctgaaagcattcggttataagcgtgaagatctgcgctggcagaagaccaaacaagtgggcctgggtgcgtggctgaaagttaaaaagtcttaa

SEQ ID NO: 96 - DNA, 2328 bp, Artificial Sequence
  Synthetic
atgattctggacacggactatattacggaagatggcaagccggttatccgcattttcaagaaggaaaatggcgaattcaagatcgaatatgatcgtgaatttgaaccgtatatctacgctctgctgaaagatgacagcgcgatcgaagaagtgaaaaagattaccgctggccgccatggtcgtgtggttaaggtgaaacgcgcggaaaaagttaaaaagaaatttctgggccgtccgattgaagtgtggaaactgtatttcacccatccgcaggatgttccggccatccgtgacgaaattcgtcgccacagcgcagtcgtggatatctatgaatacgacattccgtttgcgaaacgctatctgatcgataagggcctgattccgatggaaggtgacgaagaactgaagatgatgagcttcgatatcgaaaccctgtatcacgaaggcgaagaattcggcacgggtccgatcctgatgatttcttacgcagacgaaggtgaagctcgtgtcatcacctggaagaaaattgatctgccgtatgtggaagttgtcagcacggaaaaggaaatgatcaaacgctttctgaaggtggttaaggaaaaagatccggacgtgctgattacctataacggtgataattttgacttcgcatacctgaagaaacgttgcgaaaaaatcggcattaagttcacgctgcgtcgcgacggttctgaaccgaaaatccagcgcatgggcgatcgttttgcggtcgaagtgaaaggtcgcattcatttcgatctgtatccggttatccgtcgcaccattaacctgccgacctatacgctggaagcggtttacgaagccgtctttggcaccccgaaggaaaaagtgtacccggaagaaattaccacggcctgggaaacgggcgaaggtctggaacgcgtcgcccgttatagtatggaagatgcaaaagtgacctacgaactgggtcgcgaatttttcccgatggaagcacagctgtcccgtctgatcggccaatcactgtgggatgtgtcgcgcagctctacgggtaacctggttgaatggttcctgctgcgtaaagcgtatgaacgcaacgaactggcaccgaataaaccgtccggccgcgaatacgatgaacgtcgcggcggttatgcgggcggttacgttaaagaaccggaaaagggtctgtgggaaaacatcgtctacctggattacaagagtctgtatccgtccattatcattacccataacgttagtccggacacgctgaatcgcgaaggctgcaaagaatacgatgtggcgccgcaggttggtcaccgtttttgtaaagactttccgggcttcattccgtccctgctgggtgatctgctggaagaacgtcagaaaatcaagcgcaaaatgaaggccaccattgatccgatcgaacgtcgcctgctggactatcgtcaacgcgcgatcaaaattctggccaacagctattacggctattacggttatgcgcgtgcccgctggtactgcaaagaatgtgcagaaagcgttacggcttggggccgcgaatacatcgaaatgtctatccgtgaaatcgaagaaaagtacggtttcaaggtgctgtacgctgataccgacggcttccatgcgacgattccgggtgaagatgccgaaaccatcaaaaagaaagcaatggaattcctgaagtacatcaactcaaagctgccgggcgccctggaactggaatatgaaggcttctaccgtcgcggctttttcgttacgaagaaaaagtacgcagtcattgacgaagaaggcaaaatcaccacgcgcggtctggaaattgtgcgtcgcgattggagtgaaattgccaaagaaacccaggcacgtgttctggaagcactgctgaaagatggtaatgtcgaagaagcagtgagtattgttaaagaagtcacggaaaaactgtccaagtatgaagtcccgccggaaaaactggtgattcatgaacaaatcacccgcgaactgaaagattacaaggcgacgggcccgcacgtggcaattgctaaacgtctggcagcgcgtggcgttaagatccgtccgggtaccgttattagctatatcgtcctgaaaggctctggtcgtattggtgaccgcgccatcccgtttgatgaattcgacccggctaaacaccgctacgatgcggaatattacattgaaaatcaggtcctgccggctgtggaacgtatcctgaaagcgtttggctatcgtaaggaagatctgcgctaccagaaaacccgtcaagtgggcctgggtgcgtggctgaaaccgaagggtaaaaagtaa

SEQ ID NO: 97 - DNA, 2328 bp, Artificial Sequence
  Synthetic
atgattctggacacggactatattacggaagatggcaagccggttatccgcattttcaagaaggaaaatggcgaattcaagatcgaatatgatcgtgaatttgaaccgtatatctacgctctgctgaaagatgacagcgcgatcgaagaagtgaaaaagattaccgctggccgccatggtcgtgtggttaaggtgaaacgcgcggaaaaagttaaaaagaaatttctgggccgtccgattgaagtgtggaaactgtatttcacccatccgcaggatgttccggccatccgtgacgaaattcgtcgccacagcgcagtcgtggatatctatgaatacgacattccgtttgcgaaacgctatctgatcgataagggcctgattccgatggaaggtgacgaagaactgaagatgatgagcttcgatatcgaaaccctgtatcacgaaggcgaagaattcggcacgggtccgatcctgatgatttcttacgcagacgaaggtgaagctcgtgtcatcacctggaagaaaattgatctgccgtatgtggaagttgtcagcacggaaaaggaaatgatcaaacgctttctgaaggtggttaaggaaaaagatccggacgtgctgattacctataacggtgataattttgacttcgcatacctgaagaaacgttgcgaaaaaatcggcattaagttcacgctgcgtcgcgacggttctgaaccgaaaatccagcgcatgggcgatcgttttgcggtcgaagtgaaaggtcgcattcatttcgatctgtatccggttatccgtcgcaccattaacctgccgacctatacgctggaagcggtttacgaagccgtctttggcaccccgaaggaaaaagtgtacccggaagaaattaccacggcctgggaaacgggcgaaggtctggaacgcgtcgcccgttatagtatggaagatgcaaaagtgacctacgaactgggtcgcgaatttttcccgatggaagcacagctgtcccgtctgatcggccaatcactgtgggatgtgtcgcgcagctctacgggtaacctggttgaatggttcctgctgcgtaaagcgtatgaacgcaacgaactggcaccgaataaaccgtccggccgcgaatacgatgaacgtcgcggcggttatgcgggcggttacgttaaagaaccggaaaagggtctgtgggaaaacatcgtctacctggattacaagagtctgtatccgtccattatcattacccataacgttagtccggacacgctgaatcgcgaaggctgcaaagaatacgatgtggcgccgcaggttggtcaccgtttttgtaaagactttccgggcttcattccgtccctgctgggtgatctgctggaagaacgtcagaaaatcaagcgcaaaatgaaggccaccattgatccgatcgaacgtcgcctgctggactatcgtcaacgcgcgatcaaaattctggccaacagctattacggctattacggttatgcgcgtgcccgctggtactgcaaagaatgtgcagaaagcgttacggcttggggccgcgaatacatcgaaatgtctatccgtgaaatcgaagaaaagtacggtttcaaggtgctgtacgctgataccgacggcttccatgcgacgattccgggtgaagatgccgaaaccatcaaaaagaaagcaatggaattcctgaagtacatcaactcaaagctgccgggcgccctggaactggaatatgaaggcttctaccgtcgcggctttttcgttacgaagaaaaagtacgcagtcattgacgaagaaggcaaaatcaccacgcgcggtctggaaattgtgcgtcgcgattggagtgaaattgccaaagaaacccaggcacgcgtcctggaagcaatcctgaaagatggtgacgtggaagaagccgtccgtattgtgaaagaagttacggaaaaactgtccaaatatgaagttccgccggaaaaactggtcatccatgaacaaattacccgcgaactgaaagattacaaagcgacgggcccgcacgtcgcaatcgctaaacgtctggcggcgcgtggcgtgaaaattcgtccgggtaccgtgatctcatatattgttctgaaaggctcgggtcgtatcggtgaccgcgctattccgtttgatgaattcgacccgaaaaaacacaaatacgatgcggaatactacatcgaaaaccaggttctgccggccgtcgaacgtattctgcgcgcatttggctaccgtaaagaagatctgcgttatcaaaaaaccaaacaagtgggtctgggtgcgtggctgaaaccgaaaggtaaaaaataa

SEQ ID NO: 98 - DNA, 2325 bp, Artificial Sequence
  Synthetic
atgattctggacacggactatattacggaagatggcaagccggttatccgcattttcaagaaggaaaatggcgaattcaagatcgaatatgatcgtgaatttgaaccgtatatctacgctctgctgaaagatgacagcgcgatcgaagaagtgaaaaagattaccgctggccgccatggtcgtgtggttaaggtgaaacgcgcggaaaaagttaaaaagaaatttctgggccgtccgattgaagtgtggaaactgtatttcacccatccgcaggatgttccggccatccgtgacgaaattcgtcgccacagcgcagtcgtggatatctatgaatacgacattccgtttgcgaaacgctatctgatcgataagggcctgattccgatggaaggtgacgaagaactgaagatgatgagcttcgatatcgaaaccctgtatcacgaaggcgaagaattcggcacgggtccgatcctgatgatttcttacgcagacgaaggtgaagctcgtgtcatcacctggaagaaaattgatctgccgtatgtggaagttgtcagcacggaaaaggaaatgatcaaacgctttctgaaggtggttaaggaaaaagatccggacgtgctgattacctataacggtgataattttgacttcgcatacctgaagaaacgttgcgaaaaaatcggcattaagttcacgctgcgtcgcgacggttctgaaccgaaaatccagcgcatgggcgatcgttttgcggtcgaagtgaaaggtcgcattcatttcgatctgtatccggttatccgtcgcaccattaacctgccgacctatacgctggaagcggtttacgaagccgtctttggcaccccgaaggaaaaagtgtacccggaagaaattaccacggcctgggaaacgggcgaaggtctggaacgcgtcgcccgttatagtatggaagatgcaaaagtgacctacgaactgggtcgcgaatttttcccgatggaagcacagctgtcccgtctgatcggccaatcactgtgggatgtgtcgcgcagctctacgggtaacctggttgaatggttcctgctgcgtaaagcgtatgaacgcaacgaactggcaccgaataaaccgtccggccgcgaatacgatgaacgtcgcggcggttatgcgggcggttacgttaaagaaccggaaaagggtctgtgggaaaacatcgtctacctggattacaagagtctgtatccgtccattatcattacccataacgttagtccggacacgctgaatcgcgaaggctgcaaagaatacgatgtggcgccgcaggttggtcaccgtttttgtaaagactttccgggcttcattccgtccctgctgggtgatctgctggaagaacgtcagaaaatcaagcgcaaaatgaaggccaccattgatccgatcgaacgtcgcctgctggactatcgtcaacgcgcgatcaaaattctggccaacagctattacggctattacggttatgcgcgtgcccgctggtactgcaaagaatgtgcagaaagcgttacggcttggggccgcgaatacatcgaaatgtctatccgtgaaatcgaagaaaagtacggtttcaaggtgctgtacgctgataccgacggcttccatgcgacgattccgggtgaagatgccgaaaccatcaaaaagaaagcaatggaattcctgaagtacatcaactcaaagctgccgggcgccctggaactggaatatgaaggcttctaccgtcgcggctttttcgttacgaagaaaaagtacgcagtcattgacgaagaaggcaaaatcaccacgcgcggtctggaaattgtgcgtcgcgattggagtgaaattgccaaagaaacccaggcacgtgttctggaagcaattctgaaacatggtaacgtcgaagaagcggtcaaaatcgtgaaagaagttacggaaaaactgtctaactacgaaattccgccggaaaaactggccatctacgaacaaattacccgcccgctgcatgaatataaagcaatcggtccgcacgtcgcagtggcaaaacgtctggcagcacgcggcgttaaagtcaaaccgggtatggtcatcggctatattgtgctgcgtggtgatggcccgatcagcaaccgcgcaattctggctgaagaatacgatctgaaaaaacacaaatacgacgccgaatattacatcgaaaatcaggttctgccggctgtcctgcgtattctggaagcgtttggctatcgtaaagaagatctgcgctggcagaaaacccgtcaaacgggtctgacctcatggctgaatattaaaaaatcgtaa

SEQ ID NO: 99 - DNA, 2325 bp, Artificial Sequence
  Synthetic
atgattctggacacggactatattacggaagatggcaagccggttatccgcattttcaagaaggaaaatggcgaattcaagatcgaatatgatcgtgaatttgaaccgtatatctacgctctgctgaaagatgacagcgcgatcgaagaagtgaaaaagattaccgctggccgccatggtcgtgtggttaaggtgaaacgcgcggaaaaagttaaaaagaaatttctgggccgtccgattgaagtgtggaaactgtatttcacccatccgcaggatgttccggccatccgtgacgaaattcgtcgccacagcgcagtcgtggatatctatgaatacgacattccgtttgcgaaacgctatctgatcgataagggcctgattccgatggaaggtgacgaagaactgaagatgatgagcttcgatatcgaaaccctgtatcacgaaggcgaagaattcggcacgggtccgatcctgatgatttcttacgcagacgaaggtgaagctcgtgtcatcacctggaagaaaattgatctgccgtatgtggaagttgtcagcacggaaaaggaaatgatcaaacgctttctgaaggtggttaaggaaaaagatccggacgtgctgattacctataacggtgataattttgacttcgcatacctgaagaaacgttgcgaaaaaatcggcattaagttcacgctgcgtcgcgacggttctgaaccgaaaatccagcgcatgggcgatcgttttgcggtcgaagtgaaaggtcgcattcatttcgatctgtatccggttatccgtcgcaccattaacctgccgacctatacgctggaagcggtttacgaagccgtctttggcaccccgaaggaaaaagtgtacccggaagaaattaccacggcctgggaaacgggcgaaggtctggaacgcgtcgcccgttatagtatggaagatgcaaaagtgacctacgaactgggtcgcgaatttttcccgatggaagcacagctgtcccgtctgatcggccaatcactgtgggatgtgtcgcgcagctctacgggtaacctggttgaatggttcctgctgcgtaaagcgtatgaacgcaacgaactggcaccgaataaaccgtccggccgcgaatacgatgaacgtcgcggcggttatgcgggcggttacgttaaagaaccggaaaagggtctgtgggaaaacatcgtctacctggattacaagagtctgtatccgtccattatcattacccataacgttagtccggacacgctgaatcgcgaaggctgcaaagaatacgatgtggcgccgcaggttggtcaccgtttttgtaaagactttccgggcttcattccgtccctgctgggtgatctgctggaagaacgtcagaaaatcaagcgcaaaatgaaggccaccattgatccgatcgaacgtcgcctgctggactatcgtcaacgcgcgatcaaaattctggccaacagctattacggctattacggttatgcgcgtgcccgctggtactgcaaagaatgtgcagaaagcgttacggcttggggccgcgaatacatcgaaatgtctatccgtgaaatcgaagaaaagtacggtttcaaggtgctgtacgctgataccgacggcttccatgcgacgattccgggtgaagatgccgaaaccatcaaaaagaaagcaatggaattcctgaagtacatcaactcaaagctgccgggcgccctggaactggaatatgaaggcttctaccgtcgcggctttttcgttacgaagaaaaagtacgcagtcattgacgaagaaggcaaaatcaccacgcgcggtctggaaattgtgcgtcgcgattggagtgaaattgccaaagaaacccaggcaaaagttctggaagcaatcctgaaacatggtaatgtcgaagaagcagtgaaaattgtcaaggaagtgacggaaaaactgtcgaagtatgaaatcccgccggaaaaactggtgatctacgaacaaattacccgcccgctgcatgaatataaagcgattggcccgcacgtggcagttgctaaacgtctggcagcccgcggtgtcaaagtgcgtccgggcatggtgatcggttatattgttctgcgtggcgatggtccgatcagtaaacgcgcgattctggccgaagaatttgatccgcgcaaacacaagtacgacgccgaatattacatcgaaaaccaggtgctgccggctgttctgcgtattctggaagcgttcggctatcgtaaagaagatctgcgctggcagaaaaccaagcaaacgggtctgaccgcatggctgaatgtgaaaaagaaataa

SEQ ID NO: 100 - DNA, 2331 bp, Artificial Sequence
  Synthetic
atgattctggacacggactatattacggaagatggcaagccggttatccgcattttcaagaaggaaaatggcgaattcaagatcgaatatgatcgtgaatttgaaccgtatatctacgctctgctgaaagatgacagcgcgatcgaagaagtgaaaaagattaccgctggccgccatggtcgtgtggttaaggtgaaacgcgcggaaaaagttaaaaagaaatttctgggccgtccgattgaagtgtggaaactgtatttcacccatccgcaggatgttccggccatccgtgacgaaattcgtcgccacagcgcagtcgtggatatctatgaatacgacattccgtttgcgaaacgctatctgatcgataagggcctgattccgatggaaggtgacgaagaactgaagatgatgagcttcgatatcgaaaccctgtatcacgaaggcgaagaattcggcacgggtccgatcctgatgatttcttacgcagacgaaggtgaagctcgtgtcatcacctggaagaaaattgatctgccgtatgtggaagttgtcagcacggaaaaggaaatgatcaaacgctttctgaaggtggttaaggaaaaagatccggacgtgctgattacctataacggtgataattttgacttcgcatacctgaagaaacgttgcgaaaaaatcggcattaagttcacgctgcgtcgcgacggttctgaaccgaaaatccagcgcatgggcgatcgttttgcggtcgaagtgaaaggtcgcattcatttcgatctgtatccggttatccgtcgcaccattaacctgccgacctatacgctggaagcggtttacgaagccgtctttggcaccccgaaggaaaaagtgtacccggaagaaattaccacggcctgggaaacgggcgaaggtctggaacgcgtcgcccgttatagtatggaagatgcaaaagtgacctacgaactgggtcgcgaatttttcccgatggaagcacagctgtcccgtctgatcggccaatcactgtgggatgtgtcgcgcagctctacgggtaacctggttgaatggttcctgctgcgtaaagcgtatgaacgcaacgaactggcgccgaataaaccggatgaacgcgaatatgaacgtcgcctgcgtgaaagttatgaaggcggttacgttaaagaaccggaacgcggcctgtgggaaggtattgtgtcactggattttcgtagtctgtacccgtccattatcattacccataacgtttcgccggatacgctgaataaagaaggctgcggtgaatatgacgaagccccggaagtgggtcaccgcttctgtaaagattttccgggcttcattccgtcactgctgggttcgctgctggaagaacgccagaagatcaagaaacgtatgaaggaatctaaggatccggtggaacgcaaactgctggactatcgtcaacgcgcgatcaagattctggccaacagcttttatggctattacggttacgcgaaagcccgttggtactgcaaggaatgtgcagaaagcgtgaccgcttggggccgccagtatattgaactggtccgtcgcgaactggaagaacgtggttttaaagtgctgtatatcgataccgacggcctgtacgccacgattccgggtgaaaagaactgggaagaaatcaagcgtcgcgcactggaatttgttaactacatcaattccaaactgccgggcattctggaactggaatatgaaggcttctacacccgtggctttttcgtgacgaagaaaaagtatgcgctgatcgatgaagaaggcaaaattgtcacccgtggtctggaaatcgtgcgtcgcgattggagtgaaattgccaaagaaacccaggcacgcgttctggaagcaatcctgcgtcatggtgacgtcgaagaagccgttcgcattgtcaaagatgtgacggaaaagctgtcgaaatatgaagtcccgccggaaaaactggtgatccatgaacaaattacccgtgaactgaaggattacaaagcgacgggcccgcacgttgcaattgctaaacgcctggcagcccgtggcatcaagattcgtccgggtaccgttatcagctatattgtcctgaaaggctctggtcgcatcggtgatcgtgctattccgtttgatgaattcgacccgacgaaacaccgttacgatgccgaatattacatcgaaaatcaggtgctgccggccgttgaacgcattctgaaagcatttggctataagaaagaagaactgcgctaccagaaaacccgtcaagtgggcctgggtgcgtggctgaagctgaaaggtaagaaataa

SEQ ID NO: 101 - DNA, 2325 bp, Artificial Sequence
  Synthetic
atgattctggacacggactatattacggaagatggcaagccggttatccgcattttcaagaaggaaaatggcgaattcaagatcgaatatgatcgtgaatttgaaccgtatatctacgctctgctgaaagatgacagcgcgatcgaagaagtgaaaaagattaccgctggccgccatggtcgtgtggttaaggtgaaacgcgcggaaaaagttaaaaagaaatttctgggccgtccgattgaagtgtggaaactgtatttcacccatccgcaggatgttccggccatccgtgacgaaattcgtcgccacagcgcagtcgtggatatctatgaatacgacattccgtttgcgaaacgctatctgatcgataagggcctgattccgatggaaggtgacgaagaactgaagatgatgagcttcgatatcgaaaccctgtatcacgaaggcgaagaattcggcacgggtccgatcctgatgatttcttacgcagacgaaggtgaagctcgtgtcatcacctggaagaaaattgatctgccgtatgtggaagttgtcagcacggaaaaggaaatgatcaaacgctttctgaaggtggttaaggaaaaagatccggacgtgctgattacctataacggtgataattttgacttcgcatacctgaagaaacgttgcgaaaaaatcggcattaagttcacgctgcgtcgcgacggttctgaaccgaaaatccagcgcatgggcgatcgttttgcggtcgaagtgaaaggtcgcattcatttcgatctgtatccggttatccgtcgcaccattaacctgccgacctatacgctggaagcggtttacgaagccgtctttggcaccccgaaggaaaaagtgtacccggaagaaattaccacggcctgggaaacgggcgaaggtctggaacgcgtcgcccgttatagtatggaagatgcaaaagtgacctacgaactgggtcgcgaatttttcccgatggaagcacagctgtcccgtctgatcggccaatcactgtgggatgtgtcgcgcagctctacgggtaacctggttgaatggttcctgctgcgtaaagcgtatgaacgcaacgaactggcgccgaataaaccggatgaacgcgaatatgaacgtcgcctgcgtgaaagttatgaaggcggttacgttaaagaaccggaacgcggcctgtgggaaggtattgtgtcactggattttcgtagtctgtacccgtccattatcattacccataacgtttcgccggatacgctgaataaagaaggctgcggtgaatatgacgaagccccggaagtgggtcaccgcttctgtaaagattttccgggcttcattccgtcactgctgggttcgctgctggaagaacgccagaagatcaagaaacgtatgaaggaatctaaggatccggtggaacgcaaactgctggactatcgtcaacgcgcgatcaagattctggccaacagcttttatggctattacggttacgcgaaagcccgttggtactgcaaggaatgtgcagaaagcgtgaccgcttggggccgccagtatattgaactggtccgtcgcgaactggaagaacgtggttttaaagtgctgtatatcgataccgacggcctgtacgccacgattccgggtgaaaagaactgggaagaaatcaagcgtcgcgcactggaatttgttaactacatcaattccaaactgccgggcattctggaactggaatatgaaggcttctacacccgtggctttttcgtgacgaagaaaaagtatgcgctgatcgatgaagaaggcaaaattgtcacccgtggtctggaaatcgtgcgtcgcgattggagtgaaattgccaaagaaacccaggcacgtgtcctggaagcaatcctgaaacatggtgatgtggaagaagcggttcgcattgtcaaagaagtgacggaaaagctgtcgaaatatgaagttccgccggaaaaactggtcatccatgaacaaattacccgcgatctgcgtgactacaaagccacgggtccgcacgtggcagttgcaaaacgtctggcagcccgtggcgtgaagattcgtccgggtaccgtgatcagttatattgttctgaaaggctccggtcgcatcggtgaccgtgctattccgtttgatgaattcgacccgacgaaacaccgttacgatgccgaatattacatcgaaaatcaggtcctgccggccgtggaacgcattctgaaagcatttggttatcgcaaggaagatctgcgttaccagaagaccaaacaagtcggcctgggtgcgtggctgaaagtgaaaaagtaa

SEQ ID NO: 102 - DNA, 2331 bp, Artificial Sequence
  Synthetic
atgattctggacacggactatattacggaagatggcaagccggttatccgcattttcaagaaggaaaatggcgaattcaagatcgaatatgatcgtgaatttgaaccgtatatctacgctctgctgaaagatgacagcgcgatcgaagaagtgaaaaagattaccgctggccgccatggtcgtgtggttaaggtgaaacgcgcggaaaaagttaaaaagaaatttctgggccgtccgattgaagtgtggaaactgtatttcacccatccgcaggatgttccggccatccgtgacgaaattcgtcgccacagcgcagtcgtggatatctatgaatacgacattccgtttgcgaaacgctatctgatcgataagggcctgattccgatggaaggtgacgaagaactgaagatgatgagcttcgatatcgaaaccctgtatcacgaaggcgaagaattcggcacgggtccgatcctgatgatttcttacgcagacgaaggtgaagctcgtgtcatcacctggaagaaaattgatctgccgtatgtggaagttgtcagcacggaaaaggaaatgatcaaacgctttctgaaggtggttaaggaaaaagatccggacgtgctgattacctataacggtgataattttgacttcgcatacctgaagaaacgttgcgaaaaaatcggcattaagttcacgctgcgtcgcgacggttctgaaccgaaaatccagcgcatgggcgatcgttttgcggtcgaagtgaaaggtcgcattcatttcgatctgtatccggttatccgtcgcaccattaacctgccgacctatacgctggaagcggtttacgaagccgtctttggcaccccgaaggaaaaagtgtacccggaagaaattaccacggcctgggaaacgggcgaaggtctggaacgcgtcgcccgttatagtatggaagatgcaaaagtgacctacgaactgggtcgcgaatttttcccgatggaagcacagctgtcccgtctgatcggccaatcactgtgggatgtgtcgcgcagctctacgggtaacctggttgaatggttcctgctgcgtaaagcgtatgaacgcaacgaactggcgccgaataaaccggatgaacgcgaatatgaacgtcgcctgcgtgaaagttatgaaggcggttacgttaaagaaccggaacgcggcctgtgggaaggtattgtgtcactggattttcgtagtctgtacccgtccattatcattacccataacgtttcgccggatacgctgaataaagaaggctgcggtgaatatgacgaagccccggaagtgggtcaccgcttctgtaaagattttccgggcttcattccgtcactgctgggttcgctgctggaagaacgccagaagatcaagaaacgtatgaaggaatctaaggatccggtggaacgcaaactgctggactatcgtcaacgcgcgatcaagattctggccaacagcttttatggctattacggttacgcgaaagcccgttggtactgcaaggaatgtgcagaaagcgtgaccgcttggggccgccagtatattgaactggtccgtcgcgaactggaagaacgtggttttaaagtgctgtatatcgataccgacggcctgtacgccacgattccgggtgaaaagaactgggaagaaatcaagcgtcgcgcactggaatttgttaactacatcaattccaaactgccgggcattctggaactggaatatgaaggcttctacacccgtggctttttcgtgacgaagaaaaagtatgcgctgatcgatgaagaaggcaaaattgtcacccgtggtctggaaatcgtgcgtcgcgattggagtgaaattgccaaagaaacccaggcacgtgtgctggaagctctgctgaaagatggcaatgttgaagaagcggtttccattgtcaaagaagtgacggaaaagctgggtaaatatgaagtcccgccggaaaaactggtgatccatgaacaaattacccgcgaactgaaggattacaaagcgacgggcccgcacgttgctatcgcgaaacgtctggcagcgcgtggcgtgaagattcgtccgggtaccgttatcagctatattgtcctgaaaggctctggtcgtatcggtgaccgcgcgattccgtttgatgaattcgacccgacgaaacatcgctacgatgcagaatattacatcgaaaaccaggttctgccggctgtcgaacgtattctgaaagcgtttggctatcgtgccgaagatctgcgctaccagaaaacccgtcaagtgggcctgggtgtttggctgcaaccgaaaggtaagaaataa

SEQ ID NO: 103 - DNA, 2328 bp, Artificial Sequence
  Synthetic
atgattctggacacggactatattacggaagatggcaagccggttatccgcattttcaagaaggaaaatggcgaattcaagatcgaatatgatcgtgaatttgaaccgtatatctacgctctgctgaaagatgacagcgcgatcgaagaagtgaaaaagattaccgctggccgccatggtcgtgtggttaaggtgaaacgcgcggaaaaagttaaaaagaaatttctgggccgtccgattgaagtgtggaaactgtatttcacccatccgcaggatgttccggccatccgtgacgaaattcgtcgccacagcgcagtcgtggatatctatgaatacgacattccgtttgcgaaacgctatctgatcgataagggcctgattccgatggaaggtgacgaagaactgaagatgatgagcttcgatatcgaaaccctgtatcacgaaggcgaagaattcggcacgggtccgatcctgatgatttcttacgcagacgaaggtgaagctcgtgtcatcacctggaagaaaattgatctgccgtatgtggaagttgtcagcacggaaaaggaaatgatcaaacgctttctgaaggtggttaaggaaaaagatccggacgtgctgattacctataacggtgataattttgacttcgcatacctgaagaaacgttgcgaaaaaatcggcattaagttcacgctgcgtcgcgacggttctgaaccgaaaatccagcgcatgggcgatcgttttgcggtcgaagtgaaaggtcgcattcatttcgatctgtatccggttatccgtcgcaccattaacctgccgacctatacgctggaagcggtttacgaagccgtctttggcaccccgaaggaaaaagtgtacccggaagaaattaccacggcctgggaaacgggcgaaggtctggaacgcgtcgcccgttatagtatggaagatgcaaaagtgacctacgaactgggtcgcgaatttttcccgatggaagcacagctgtcccgtctgatcggccaatcactgtgggatgtgtcgcgcagctctacgggtaacctggttgaatggttcctgctgcgtaaagcgtatgaacgcaacgaactggcgccgaataaaccggatgaacgcgaatatgaacgtcgcctgcgtgaaagttatgaaggcggttacgttaaagaaccggaacgcggcctgtgggaaggtattgtgtcactggattttcgtagtctgtacccgtccattatcattacccataacgtttcgccggatacgctgaataaagaaggctgcggtgaatatgacgaagccccggaagtgggtcaccgcttctgtaaagattttccgggcttcattccgtcactgctgggttcgctgctggaagaacgccagaagatcaagaaacgtatgaaggaatctaaggatccggtggaacgcaaactgctggactatcgtcaacgcgcgatcaagattctggccaacagcttttatggctattacggttacgcgaaagcccgttggtactgcaaggaatgtgcagaaagcgtgaccgcttggggccgccagtatattgaactggtccgtcgcgaactggaagaacgtggttttaaagtgctgtatatcgataccgacggcctgtacgccacgattccgggtgaaaagaactgggaagaaatcaagcgtcgcgcactggaatttgttaactacatcaattccaaactgccgggcattctggaactggaatatgaaggcttctacacccgtggctttttcgtgacgaagaaaaagtatgcgctgatcgatgaagaaggcaaaattgtcacccgtggtctggaaatcgtgcgtcgcgattggagtgaaattgccaaagaaacccaggcaaaggttctggaagcaattctgaaacatggtaacgtcgaagaagcggtcaagatcgtgaaagaagttaccgaaaaactgtcgaattatgaaattccggtcgaaaagctggtgatctacgaacaaattacgcgcccgctgaacgaatataaagccattggcccgcacgtggcagttgctaaacgtctggcggccaagggtatcaagattaaaccgggcatggtgattggttatgttgtcctgcgcggcgatggtccgatcagcaaacgtgcgatcgccatcgaagaattcgatggcaaaaagcataagtacgacgcagaatactacatcgaaaatcaggttctgccggccgtcgaacgtatcctgaaagcattcggttataagcgtgaagatctgcgctggcagaagaccaaacaagtgggcctgggtgcgtggctgaaagttaaaaagtcttaa

SEQ ID NO: 104 - DNA, 2331 bp, Artificial Sequence
  Synthetic
atgattctggacacggactatattacggaagatggcaagccggttatccgcattttcaagaaggaaaatggcgaattcaagatcgaatatgatcgtgaatttgaaccgtatatctacgctctgctgaaagatgacagcgcgatcgaagaagtgaaaaagattaccgctggccgccatggtcgtgtggttaaggtgaaacgcgcggaaaaagttaaaaagaaatttctgggccgtccgattgaagtgtggaaactgtatttcacccatccgcaggatgttccggccatccgtgacgaaattcgtcgccacagcgcagtcgtggatatctatgaatacgacattccgtttgcgaaacgctatctgatcgataagggcctgattccgatggaaggtgacgaagaactgaagatgatgagcttcgatatcgaaaccctgtatcacgaaggcgaagaattcggcacgggtccgatcctgatgatttcttacgcagacgaaggtgaagctcgtgtcatcacctggaagaaaattgatctgccgtatgtggaagttgtcagcacggaaaaggaaatgatcaaacgctttctgaaggtggttaaggaaaaagatccggacgtgctgattacctataacggtgataattttgacttcgcatacctgaagaaacgttgcgaaaaaatcggcattaagttcacgctgcgtcgcgacggttctgaaccgaaaatccagcgcatgggcgatcgttttgcggtcgaagtgaaaggtcgcattcatttcgatctgtatccggttatccgtcgcaccattaacctgccgacctatacgctggaagcggtttacgaagccgtctttggcaccccgaaggaaaaagtgtacccggaagaaattaccacggcctgggaaacgggcgaaggtctggaacgcgtcgcccgttatagtatggaagatgcaaaagtgacctacgaactgggtcgcgaatttttcccgatggaagcacagctgtcccgtctgatcggccaatcactgtgggatgtgtcgcgcagctctacgggtaacctggttgaatggttcctgctgcgtaaagcgtatgaacgcaacgaactggcgccgaataaaccggatgaacgcgaatatgaacgtcgcctgcgtgaaagttatgaaggcggttacgttaaagaaccggaacgcggcctgtgggaaggtattgtgtcactggattttcgtagtctgtacccgtccattatcattacccataacgtttcgccggatacgctgaataaagaaggctgcggtgaatatgacgaagccccggaagtgggtcaccgcttctgtaaagattttccgggcttcattccgtcactgctgggttcgctgctggaagaacgccagaagatcaagaaacgtatgaaggaatctaaggatccggtggaacgcaaactgctggactatcgtcaacgcgcgatcaagattctggccaacagcttttatggctattacggttacgcgaaagcccgttggtactgcaaggaatgtgcagaaagcgtgaccgcttggggccgccagtatattgaactggtccgtcgcgaactggaagaacgtggttttaaagtgctgtatatcgataccgacggcctgtacgccacgattccgggtgaaaagaactgggaagaaatcaagcgtcgcgcactggaatttgttaactacatcaattccaaactgccgggcattctggaactggaatatgaaggcttctacacccgtggctttttcgtgacgaagaaaaagtatgcgctgatcgatgaagaaggcaaaattgtcacccgtggtctggaaatcgtgcgtcgcgattggagtgaaattgccaaagaaacccaggcacgtgttctggaagcactgctgaaagatggtaatgtcgaagaagcagtgagtattgttaaagaagtcacggaaaaactgtccaagtatgaagtcccgccggaaaaactggtgattcatgaacaaatcacccgcgaactgaaagattacaaggcgacgggcccgcacgtggcaattgctaaacgtctggcagcgcgtggcgttaagatccgtccgggtaccgttattagctatatcgtcctgaaaggctctggtcgtattggtgaccgcgccatcccgtttgatgaattcgacccggctaaacaccgctacgatgcggaatattacattgaaaatcaggtcctgccggctgtggaacgtatcctgaaagcgtttggctatcgtaaggaagatctgcgctaccagaaaacccgtcaagtgggcctgggtgcgtggctgaaaccgaagggtaaaaagtaa

SEQ ID NO: 105 - DNA, 2331 bp, Artificial Sequence
  Synthetic
atgattctggacacggactatattacggaagatggcaagccggttatccgcattttcaagaaggaaaatggcgaattcaagatcgaatatgatcgtgaatttgaaccgtatatctacgctctgctgaaagatgacagcgcgatcgaagaagtgaaaaagattaccgctggccgccatggtcgtgtggttaaggtgaaacgcgcggaaaaagttaaaaagaaatttctgggccgtccgattgaagtgtggaaactgtatttcacccatccgcaggatgttccggccatccgtgacgaaattcgtcgccacagcgcagtcgtggatatctatgaatacgacattccgtttgcgaaacgctatctgatcgataagggcctgattccgatggaaggtgacgaagaactgaagatgatgagcttcgatatcgaaaccctgtatcacgaaggcgaagaattcggcacgggtccgatcctgatgatttcttacgcagacgaaggtgaagctcgtgtcatcacctggaagaaaattgatctgccgtatgtggaagttgtcagcacggaaaaggaaatgatcaaacgctttctgaaggtggttaaggaaaaagatccggacgtgctgattacctataacggtgataattttgacttcgcatacctgaagaaacgttgcgaaaaaatcggcattaagttcacgctgcgtcgcgacggttctgaaccgaaaatccagcgcatgggcgatcgttttgcggtcgaagtgaaaggtcgcattcatttcgatctgtatccggttatccgtcgcaccattaacctgccgacctatacgctggaagcggtttacgaagccgtctttggcaccccgaaggaaaaagtgtacccggaagaaattaccacggcctgggaaacgggcgaaggtctggaacgcgtcgcccgttatagtatggaagatgcaaaagtgacctacgaactgggtcgcgaatttttcccgatggaagcacagctgtcccgtctgatcggccaatcactgtgggatgtgtcgcgcagctctacgggtaacctggttgaatggttcctgctgcgtaaagcgtatgaacgcaacgaactggcgccgaataaaccggatgaacgcgaatatgaacgtcgcctgcgtgaaagttatgaaggcggttacgttaaagaaccggaacgcggcctgtgggaaggtattgtgtcactggattttcgtagtctgtacccgtccattatcattacccataacgtttcgccggatacgctgaataaagaaggctgcggtgaatatgacgaagccccggaagtgggtcaccgcttctgtaaagattttccgggcttcattccgtcactgctgggttcgctgctggaagaacgccagaagatcaagaaacgtatgaaggaatctaaggatccggtggaacgcaaactgctggactatcgtcaacgcgcgatcaagattctggccaacagcttttatggctattacggttacgcgaaagcccgttggtactgcaaggaatgtgcagaaagcgtgaccgcttggggccgccagtatattgaactggtccgtcgcgaactggaagaacgtggttttaaagtgctgtatatcgataccgacggcctgtacgccacgattccgggtgaaaagaactgggaagaaatcaagcgtcgcgcactggaatttgttaactacatcaattccaaactgccgggcattctggaactggaatatgaaggcttctacacccgtggctttttcgtgacgaagaaaaagtatgcgctgatcgatgaagaaggcaaaattgtcacccgtggtctggaaatcgtgcgtcgcgattggagtgaaattgccaaagaaacccaggcacgcgtcctggaagcaatcctgaaagatggtgacgtggaagaagccgtccgtattgtgaaagaagttacggaaaaactgtccaaatatgaagttccgccggaaaaactggtcatccatgaacaaattacccgcgaactgaaagattacaaagcgacgggcccgcacgtcgcaatcgctaaacgtctggcggcgcgtggcgtgaaaattcgtccgggtaccgtgatctcatatattgttctgaaaggctcgggtcgtatcggtgaccgcgctattccgtttgatgaattcgacccgaaaaaacacaaatacgatgcggaatactacatcgaaaaccaggttctgccggccgtcgaacgtattctgcgcgcatttggctaccgtaaagaagatctgcgttatcaaaaaaccaaacaagtgggtctgggtgcgtggctgaaaccgaaaggtaaaaaataa

SEQ ID NO: 106 - DNA, 2328 bp, Artificial Sequence
  Synthetic
atgattctggacacggactatattacggaagatggcaagccggttatccgcattttcaagaaggaaaatggcgaattcaagatcgaatatgatcgtgaatttgaaccgtatatctacgctctgctgaaagatgacagcgcgatcgaagaagtgaaaaagattaccgctggccgccatggtcgtgtggttaaggtgaaacgcgcggaaaaagttaaaaagaaatttctgggccgtccgattgaagtgtggaaactgtatttcacccatccgcaggatgttccggccatccgtgacgaaattcgtcgccacagcgcagtcgtggatatctatgaatacgacattccgtttgcgaaacgctatctgatcgataagggcctgattccgatggaaggtgacgaagaactgaagatgatgagcttcgatatcgaaaccctgtatcacgaaggcgaagaattcggcacgggtccgatcctgatgatttcttacgcagacgaaggtgaagctcgtgtcatcacctggaagaaaattgatctgccgtatgtggaagttgtcagcacggaaaaggaaatgatcaaacgctttctgaaggtggttaaggaaaaagatccggacgtgctgattacctataacggtgataattttgacttcgcatacctgaagaaacgttgcgaaaaaatcggcattaagttcacgctgcgtcgcgacggttctgaaccgaaaatccagcgcatgggcgatcgttttgcggtcgaagtgaaaggtcgcattcatttcgatctgtatccggttatccgtcgcaccattaacctgccgacctatacgctggaagcggtttacgaagccgtctttggcaccccgaaggaaaaagtgtacccggaagaaattaccacggcctgggaaacgggcgaaggtctggaacgcgtcgcccgttatagtatggaagatgcaaaagtgacctacgaactgggtcgcgaatttttcccgatggaagcacagctgtcccgtctgatcggccaatcactgtgggatgtgtcgcgcagctctacgggtaacctggttgaatggttcctgctgcgtaaagcgtatgaacgcaacgaactggcgccgaataaaccggatgaacgcgaatatgaacgtcgcctgcgtgaaagttatgaaggcggttacgttaaagaaccggaacgcggcctgtgggaaggtattgtgtcactggattttcgtagtctgtacccgtccattatcattacccataacgtttcgccggatacgctgaataaagaaggctgcggtgaatatgacgaagccccggaagtgggtcaccgcttctgtaaagattttccgggcttcattccgtcactgctgggttcgctgctggaagaacgccagaagatcaagaaacgtatgaaggaatctaaggatccggtggaacgcaaactgctggactatcgtcaacgcgcgatcaagattctggccaacagcttttatggctattacggttacgcgaaagcccgttggtactgcaaggaatgtgcagaaagcgtgaccgcttggggccgccagtatattgaactggtccgtcgcgaactggaagaacgtggttttaaagtgctgtatatcgataccgacggcctgtacgccacgattccgggtgaaaagaactgggaagaaatcaagcgtcgcgcactggaatttgttaactacatcaattccaaactgccgggcattctggaactggaatatgaaggcttctacacccgtggctttttcgtgacgaagaaaaagtatgcgctgatcgatgaagaaggcaaaattgtcacccgtggtctggaaatcgtgcgtcgcgattggagtgaaattgccaaagaaacccaggcacgtgttctggaagcaattctgaaacatggtaacgtcgaagaagcggtcaaaatcgtgaaagaagttacggaaaaactgtctaactacgaaattccgccggaaaaactggccatctacgaacaaattacccgcccgctgcatgaatataaagcaatcggtccgcacgtcgcagtggcaaaacgtctggcagcacgcggcgttaaagtcaaaccgggtatggtcatcggctatattgtgctgcgtggtgatggcccgatcagcaaccgcgcaattctggctgaagaatacgatctgaaaaaacacaaatacgacgccgaatattacatcgaaaatcaggttctgccggctgtcctgcgtattctggaagcgtttggctatcgtaaagaagatctgcgctggcagaaaacccgtcaaacgggtctgacctcatggctgaatattaaaaaatcgtaa

SEQ ID NO: 107 - DNA, 2328 bp, Artificial Sequence
  Synthetic
atgattctggacacggactatattacggaagatggcaagccggttatccgcattttcaagaaggaaaatggcgaattcaagatcgaatatgatcgtgaatttgaaccgtatatctacgctctgctgaaagatgacagcgcgatcgaagaagtgaaaaagattaccgctggccgccatggtcgtgtggttaaggtgaaacgcgcggaaaaagttaaaaagaaatttctgggccgtccgattgaagtgtggaaactgtatttcacccatccgcaggatgttccggccatccgtgacgaaattcgtcgccacagcgcagtcgtggatatctatgaatacgacattccgtttgcgaaacgctatctgatcgataagggcctgattccgatggaaggtgacgaagaactgaagatgatgagcttcgatatcgaaaccctgtatcacgaaggcgaagaattcggcacgggtccgatcctgatgatttcttacgcagacgaaggtgaagctcgtgtcatcacctggaagaaaattgatctgccgtatgtggaagttgtcagcacggaaaaggaaatgatcaaacgctttctgaaggtggttaaggaaaaagatccggacgtgctgattacctataacggtgataattttgacttcgcatacctgaagaaacgttgcgaaaaaatcggcattaagttcacgctgcgtcgcgacggttctgaaccgaaaatccagcgcatgggcgatcgttttgcggtcgaagtgaaaggtcgcattcatttcgatctgtatccggttatccgtcgcaccattaacctgccgacctatacgctggaagcggtttacgaagccgtctttggcaccccgaaggaaaaagtgtacccggaagaaattaccacggcctgggaaacgggcgaaggtctggaacgcgtcgcccgttatagtatggaagatgcaaaagtgacctacgaactgggtcgcgaatttttcccgatggaagcacagctgtcccgtctgatcggccaatcactgtgggatgtgtcgcgcagctctacgggtaacctggttgaatggttcctgctgcgtaaagcgtatgaacgcaacgaactggcgccgaataaaccggatgaacgcgaatatgaacgtcgcctgcgtgaaagttatgaaggcggttacgttaaagaaccggaacgcggcctgtgggaaggtattgtgtcactggattttcgtagtctgtacccgtccattatcattacccataacgtttcgccggatacgctgaataaagaaggctgcggtgaatatgacgaagccccggaagtgggtcaccgcttctgtaaagattttccgggcttcattccgtcactgctgggttcgctgctggaagaacgccagaagatcaagaaacgtatgaaggaatctaaggatccggtggaacgcaaactgctggactatcgtcaacgcgcgatcaagattctggccaacagcttttatggctattacggttacgcgaaagcccgttggtactgcaaggaatgtgcagaaagcgtgaccgcttggggccgccagtatattgaactggtccgtcgcgaactggaagaacgtggttttaaagtgctgtatatcgataccgacggcctgtacgccacgattccgggtgaaaagaactgggaagaaatcaagcgtcgcgcactggaatttgttaactacatcaattccaaactgccgggcattctggaactggaatatgaaggcttctacacccgtggctttttcgtgacgaagaaaaagtatgcgctgatcgatgaagaaggcaaaattgtcacccgtggtctggaaatcgtgcgtcgcgattggagtgaaattgccaaagaaacccaggcaaaagttctggaagcaatcctgaaacatggtaatgtcgaagaagcagtgaaaattgtcaaggaagtgacggaaaaactgtcgaagtatgaaatcccgccggaaaaactggtgatctacgaacaaattacccgcccgctgcatgaatataaagcgattggcccgcacgtggcagttgctaaacgtctggcagcccgcggtgtcaaagtgcgtccgggcatggtgatcggttatattgttctgcgtggcgatggtccgatcagtaaacgcgcgattctggccgaagaatttgatccgcgcaaacacaagtacgacgccgaatattacatcgaaaaccaggtgctgccggctgttctgcgtattctggaagcgttcggctatcgtaaagaagatctgcgctggcagaaaaccaagcaaacgggtctgaccgcatggctgaatgtgaaaaagaaataa

SEQ ID NO: 108 - DNA, 2328 bp, Artificial Sequence
  Synthetic
atgattctggacacggactatattacggaagatggcaagccggttatccgcattttcaagaaggaaaatggcgaattcaagatcgaatatgatcgtgaatttgaaccgtatatctacgctctgctgaaagatgacagcgcgatcgaagaagtgaaaaagattaccgctggccgccatggtcgtgtggttaaggtgaaacgcgcggaaaaagttaaaaagaaatttctgggccgtccgattgaagtgtggaaactgtatttcacccatccgcaggatgttccggccatccgtgacgaaattcgtcgccacagcgcagtcgtggatatctatgaatacgacattccgtttgcgaaacgctatctgatcgataagggcctgattccgatggaaggtgacgaagaactgaagatgatgagcttcgatatcgaaaccctgtatcacgaaggcgaagaattcggcacgggtccgatcctgatgatttcttacgcagacgaaggtgaagctcgtgtcatcacctggaagaaaattgatctgccgtatgtggaagttgtcagcacggaaaaggaaatgatcaaacgctttctgaaggtggttaaggaaaaagatccggacgtgctgattacctataacggtgataattttgacttcgcatacctgaagaaacgttgcgaaaaaatcggcattaagttcacgctgcgtcgcgacggttctgaaccgaaaatccagcgcatgggcgatcgttttgcggtcgaagtgaaaggtcgcattcatttcgatctgtatccggttatccgtcgcaccattaacctgccgacctatacgctggaagcggtttacgaagccgtctttggcaccccgaaggaaaaagtgtacccggaagaaattaccacggcctgggaaacgggcgaaggtctggaacgcgtcgcccgttatagtatggaagatgcaaaagtgacctacgaactgggtcgcgaatttttcccgatggaagcacagctgtcccgtctgatcggccaatcactgtgggatgtgtcgcgcagctctacgggtaacctggttgaatggttcctgctgcgtaaagcgtatgaacgcaacgaactggcgccgaataaaccgtcgggccgcgaatacgatgaacgtcgcgaaggttatgcgggcggttacgttaaagaaccggaacgtggtctgtgggaaaacatcgtgtacctggattacaaaagtctgtatccgtccattatcattacccataacgtgagcccggacacgctgaatcgcgaaggctgcaaagaatacgatgtcgccccgcaagtgggtcacaaattttgtaaagactttccgggcttcattccgtctctgctgggtgatctgctggaagaacgtcagaaaattaaaaagaaaatgaaagcaaccaaagatccgattgagaaaaaactgctggactatcgtcaacgcgcgatcaaaattctggccaacagttattacggctattacggttatgcgaaagcccgctggtactgcaaagaatgtgcagaatccgttacggcttggggccgtgaatatatcgaaaccacgatccgcgaaatcgaagaaaaatacggtttcaaagtgctgtacgccgataccgacggcttccatgcaacgatcccgggtgaagatgctgaagaaattaagaaaaaagcgaaagaattcctgaaatacatcaacagcaaactgccgggcgccctggaactggaatatgaaggcttctaccgtcgcggctttttcgtgaccaagaaaaaatacgcagttatcgacgaagaaggcaaaattaccacgcgtggtctggaaatcgtgcgtcgcgattggagtgaaattgccaaagaaacccaggcacgcgttctggaagcaatcctgcgtcatggtgacgtcgaagaagccgttcgcattgtcaaagatgtgacggaaaagctgtcgaaatatgaagtcccgccggaaaaactggtgatccatgaacaaattacccgtgaactgaaggattacaaagcgacgggcccgcacgttgcaattgctaaacgcctggcagcccgtggcatcaagattcgtccgggtaccgttatcagctatattgtcctgaaaggctctggtcgcatcggtgatcgtgctattccgtttgatgaattcgacccgacgaaacaccgttacgatgccgaatattacatcgaaaatcaggtgctgccggccgttgaacgcattctgaaagcatttggctataagaaagaagaactgcgctaccagaaaacccgtcaagtgggcctgggtgcgtggctgaagctgaaaggtaagaaataa

SEQ ID NO: 109 - DNA, 2322 bp, Artificial Sequence
  Synthetic
atgattctggacacggactatattacggaagatggcaagccggttatccgcattttcaagaaggaaaatggcgaattcaagatcgaatatgatcgtgaatttgaaccgtatatctacgctctgctgaaagatgacagcgcgatcgaagaagtgaaaaagattaccgctggccgccatggtcgtgtggttaaggtgaaacgcgcggaaaaagttaaaaagaaatttctgggccgtccgattgaagtgtggaaactgtatttcacccatccgcaggatgttccggccatccgtgacgaaattcgtcgccacagcgcagtcgtggatatctatgaatacgacattccgtttgcgaaacgctatctgatcgataagggcctgattccgatggaaggtgacgaagaactgaagatgatgagcttcgatatcgaaaccctgtatcacgaaggcgaagaattcggcacgggtccgatcctgatgatttcttacgcagacgaaggtgaagctcgtgtcatcacctggaagaaaattgatctgccgtatgtggaagttgtcagcacggaaaaggaaatgatcaaacgctttctgaaggtggttaaggaaaaagatccggacgtgctgattacctataacggtgataattttgacttcgcatacctgaagaaacgttgcgaaaaaatcggcattaagttcacgctgcgtcgcgacggttctgaaccgaaaatccagcgcatgggcgatcgttttgcggtcgaagtgaaaggtcgcattcatttcgatctgtatccggttatccgtcgcaccattaacctgccgacctatacgctggaagcggtttacgaagccgtctttggcaccccgaaggaaaaagtgtacccggaagaaattaccacggcctgggaaacgggcgaaggtctggaacgcgtcgcccgttatagtatggaagatgcaaaagtgacctacgaactgggtcgcgaatttttcccgatggaagcacagctgtcccgtctgatcggccaatcactgtgggatgtgtcgcgcagctctacgggtaacctggttgaatggttcctgctgcgtaaagcgtatgaacgcaacgaactggcgccgaataaaccgtcgggccgcgaatacgatgaacgtcgcgaaggttatgcgggcggttacgttaaagaaccggaacgtggtctgtgggaaaacatcgtgtacctggattacaaaagtctgtatccgtccattatcattacccataacgtgagcccggacacgctgaatcgcgaaggctgcaaagaatacgatgtcgccccgcaagtgggtcacaaattttgtaaagactttccgggcttcattccgtctctgctgggtgatctgctggaagaacgtcagaaaattaaaaagaaaatgaaagcaaccaaagatccgattgagaaaaaactgctggactatcgtcaacgcgcgatcaaaattctggccaacagttattacggctattacggttatgcgaaagcccgctggtactgcaaagaatgtgcagaatccgttacggcttggggccgtgaatatatcgaaaccacgatccgcgaaatcgaagaaaaatacggtttcaaagtgctgtacgccgataccgacggcttccatgcaacgatcccgggtgaagatgctgaagaaattaagaaaaaagcgaaagaattcctgaaatacatcaacagcaaactgccgggcgccctggaactggaatatgaaggcttctaccgtcgcggctttttcgtgaccaagaaaaaatacgcagttatcgacgaagaaggcaaaattaccacgcgtggtctggaaatcgtgcgtcgcgattggagtgaaattgccaaagaaacccaggcacgtgtcctggaagcaatcctgaaacatggtgatgtggaagaagcggttcgcattgtcaaagaagtgacggaaaagctgtcgaaatatgaagttccgccggaaaaactggtcatccatgaacaaattacccgcgatctgcgtgactacaaagccacgggtccgcacgtggcagttgcaaaacgtctggcagcccgtggcgtgaagattcgtccgggtaccgtgatcagttatattgttctgaaaggctccggtcgcatcggtgaccgtgctattccgtttgatgaattcgacccgacgaaacaccgttacgatgccgaatattacatcgaaaatcaggtcctgccggccgtggaacgcattctgaaagcatttggttatcgcaaggaagatctgcgttaccagaagaccaaacaagtcggcctgggtgcgtggctgaaagtgaaaaagtaa

SEQ ID NO: 110 - DNA, 2328 bp, Artificial Sequence
  Synthetic
atgattctggacacggactatattacggaagatggcaagccggttatccgcattttcaagaaggaaaatggcgaattcaagatcgaatatgatcgtgaatttgaaccgtatatctacgctctgctgaaagatgacagcgcgatcgaagaagtgaaaaagattaccgctggccgccatggtcgtgtggttaaggtgaaacgcgcggaaaaagttaaaaagaaatttctgggccgtccgattgaagtgtggaaactgtatttcacccatccgcaggatgttccggccatccgtgacgaaattcgtcgccacagcgcagtcgtggatatctatgaatacgacattccgtttgcgaaacgctatctgatcgataagggcctgattccgatggaaggtgacgaagaactgaagatgatgagcttcgatatcgaaaccctgtatcacgaaggcgaagaattcggcacgggtccgatcctgatgatttcttacgcagacgaaggtgaagctcgtgtcatcacctggaagaaaattgatctgccgtatgtggaagttgtcagcacggaaaaggaaatgatcaaacgctttctgaaggtggttaaggaaaaagatccggacgtgctgattacctataacggtgataattttgacttcgcatacctgaagaaacgttgcgaaaaaatcggcattaagttcacgctgcgtcgcgacggttctgaaccgaaaatccagcgcatgggcgatcgttttgcggtcgaagtgaaaggtcgcattcatttcgatctgtatccggttatccgtcgcaccattaacctgccgacctatacgctggaagcggtttacgaagccgtctttggcaccccgaaggaaaaagtgtacccggaagaaattaccacggcctgggaaacgggcgaaggtctggaacgcgtcgcccgttatagtatggaagatgcaaaagtgacctacgaactgggtcgcgaatttttcccgatggaagcacagctgtcccgtctgatcggccaatcactgtgggatgtgtcgcgcagctctacgggtaacctggttgaatggttcctgctgcgtaaagcgtatgaacgcaacgaactggcgccgaataaaccgtcgggccgcgaatacgatgaacgtcgcgaaggttatgcgggcggttacgttaaagaaccggaacgtggtctgtgggaaaacatcgtgtacctggattacaaaagtctgtatccgtccattatcattacccataacgtgagcccggacacgctgaatcgcgaaggctgcaaagaatacgatgtcgccccgcaagtgggtcacaaattttgtaaagactttccgggcttcattccgtctctgctgggtgatctgctggaagaacgtcagaaaattaaaaagaaaatgaaagcaaccaaagatccgattgagaaaaaactgctggactatcgtcaacgcgcgatcaaaattctggccaacagttattacggctattacggttatgcgaaagcccgctggtactgcaaagaatgtgcagaatccgttacggcttggggccgtgaatatatcgaaaccacgatccgcgaaatcgaagaaaaatacggtttcaaagtgctgtacgccgataccgacggcttccatgcaacgatcccgggtgaagatgctgaagaaattaagaaaaaagcgaaagaattcctgaaatacatcaacagcaaactgccgggcgccctggaactggaatatgaaggcttctaccgtcgcggctttttcgtgaccaagaaaaaatacgcagttatcgacgaagaaggcaaaattaccacgcgtggtctggaaatcgtgcgtcgcgattggagtgaaattgccaaagaaacccaggcacgtgtgctggaagctctgctgaaagatggcaatgttgaagaagcggtttccattgtcaaagaagtgacggaaaagctgggtaaatatgaagtcccgccggaaaaactggtgatccatgaacaaattacccgcgaactgaaggattacaaagcgacgggcccgcacgttgctatcgcgaaacgtctggcagcgcgtggcgtgaagattcgtccgggtaccgttatcagctatattgtcctgaaaggctctggtcgtatcggtgaccgcgcgattccgtttgatgaattcgacccgacgaaacatcgctacgatgcagaatattacatcgaaaaccaggttctgccggctgtcgaacgtattctgaaagcgtttggctatcgtgccgaagatctgcgctaccagaaaacccgtcaagtgggcctgggtgtttggctgcaaccgaaaggtaagaaataa

SEQ ID NO: 111 - DNA, 2325 bp, Artificial Sequence
  Synthetic
atgattctggacacggactatattacggaagatggcaagccggttatccgcattttcaagaaggaaaatggcgaattcaagatcgaatatgatcgtgaatttgaaccgtatatctacgctctgctgaaagatgacagcgcgatcgaagaagtgaaaaagattaccgctggccgccatggtcgtgtggttaaggtgaaacgcgcggaaaaagttaaaaagaaatttctgggccgtccgattgaagtgtggaaactgtatttcacccatccgcaggatgttccggccatccgtgacgaaattcgtcgccacagcgcagtcgtggatatctatgaatacgacattccgtttgcgaaacgctatctgatcgataagggcctgattccgatggaaggtgacgaagaactgaagatgatgagcttcgatatcgaaaccctgtatcacgaaggcgaagaattcggcacgggtccgatcctgatgatttcttacgcagacgaaggtgaagctcgtgtcatcacctggaagaaaattgatctgccgtatgtggaagttgtcagcacggaaaaggaaatgatcaaacgctttctgaaggtggttaaggaaaaagatccggacgtgctgattacctataacggtgataattttgacttcgcatacctgaagaaacgttgcgaaaaaatcggcattaagttcacgctgcgtcgcgacggttctgaaccgaaaatccagcgcatgggcgatcgttttgcggtcgaagtgaaaggtcgcattcatttcgatctgtatccggttatccgtcgcaccattaacctgccgacctatacgctggaagcggtttacgaagccgtctttggcaccccgaaggaaaaagtgtacccggaagaaattaccacggcctgggaaacgggcgaaggtctggaacgcgtcgcccgttatagtatggaagatgcaaaagtgacctacgaactgggtcgcgaatttttcccgatggaagcacagctgtcccgtctgatcggccaatcactgtgggatgtgtcgcgcagctctacgggtaacctggttgaatggttcctgctgcgtaaagcgtatgaacgcaacgaactggcgccgaataaaccgtcgggccgcgaatacgatgaacgtcgcgaaggttatgcgggcggttacgttaaagaaccggaacgtggtctgtgggaaaacatcgtgtacctggattacaaaagtctgtatccgtccattatcattacccataacgtgagcccggacacgctgaatcgcgaaggctgcaaagaatacgatgtcgccccgcaagtgggtcacaaattttgtaaagactttccgggcttcattccgtctctgctgggtgatctgctggaagaacgtcagaaaattaaaaagaaaatgaaagcaaccaaagatccgattgagaaaaaactgctggactatcgtcaacgcgcgatcaaaattctggccaacagttattacggctattacggttatgcgaaagcccgctggtactgcaaagaatgtgcagaatccgttacggcttggggccgtgaatatatcgaaaccacgatccgcgaaatcgaagaaaaatacggtttcaaagtgctgtacgccgataccgacggcttccatgcaacgatcccgggtgaagatgctgaagaaattaagaaaaaagcgaaagaattcctgaaatacatcaacagcaaactgccgggcgccctggaactggaatatgaaggcttctaccgtcgcggctttttcgtgaccaagaaaaaatacgcagttatcgacgaagaaggcaaaattaccacgcgtggtctggaaatcgtgcgtcgcgattggagtgaaattgccaaagaaacccaggcaaaggttctggaagcaattctgaaacatggtaacgtcgaagaagcggtcaagatcgtgaaagaagttaccgaaaaactgtcgaattatgaaattccggtcgaaaagctggtgatctacgaacaaattacgcgcccgctgaacgaatataaagccattggcccgcacgtggcagttgctaaacgtctggcggccaagggtatcaagattaaaccgggcatggtgattggttatgttgtcctgcgcggcgatggtccgatcagcaaacgtgcgatcgccatcgaagaattcgatggcaaaaagcataagtacgacgcagaatactacatcgaaaatcaggttctgccggccgtcgaacgtatcctgaaagcattcggttataagcgtgaagatctgcgctggcagaagaccaaacaagtgggcctgggtgcgtggctgaaagttaaaaagtcttaa

SEQ ID NO: 112 - DNA, 2328 bp, Artificial Sequence
  Synthetic
atgattctggacacggactatattacggaagatggcaagccggttatccgcattttcaagaaggaaaatggcgaattcaagatcgaatatgatcgtgaatttgaaccgtatatctacgctctgctgaaagatgacagcgcgatcgaagaagtgaaaaagattaccgctggccgccatggtcgtgtggttaaggtgaaacgcgcggaaaaagttaaaaagaaatttctgggccgtccgattgaagtgtggaaactgtatttcacccatccgcaggatgttccggccatccgtgacgaaattcgtcgccacagcgcagtcgtggatatctatgaatacgacattccgtttgcgaaacgctatctgatcgataagggcctgattccgatggaaggtgacgaagaactgaagatgatgagcttcgatatcgaaaccctgtatcacgaaggcgaagaattcggcacgggtccgatcctgatgatttcttacgcagacgaaggtgaagctcgtgtcatcacctggaagaaaattgatctgccgtatgtggaagttgtcagcacggaaaaggaaatgatcaaacgctttctgaaggtggttaaggaaaaagatccggacgtgctgattacctataacggtgataattttgacttcgcatacctgaagaaacgttgcgaaaaaatcggcattaagttcacgctgcgtcgcgacggttctgaaccgaaaatccagcgcatgggcgatcgttttgcggtcgaagtgaaaggtcgcattcatttcgatctgtatccggttatccgtcgcaccattaacctgccgacctatacgctggaagcggtttacgaagccgtctttggcaccccgaaggaaaaagtgtacccggaagaaattaccacggcctgggaaacgggcgaaggtctggaacgcgtcgcccgttatagtatggaagatgcaaaagtgacctacgaactgggtcgcgaatttttcccgatggaagcacagctgtcccgtctgatcggccaatcactgtgggatgtgtcgcgcagctctacgggtaacctggttgaatggttcctgctgcgtaaagcgtatgaacgcaacgaactggcgccgaataaaccgtcgggccgcgaatacgatgaacgtcgcgaaggttatgcgggcggttacgttaaagaaccggaacgtggtctgtgggaaaacatcgtgtacctggattacaaaagtctgtatccgtccattatcattacccataacgtgagcccggacacgctgaatcgcgaaggctgcaaagaatacgatgtcgccccgcaagtgggtcacaaattttgtaaagactttccgggcttcattccgtctctgctgggtgatctgctggaagaacgtcagaaaattaaaaagaaaatgaaagcaaccaaagatccgattgagaaaaaactgctggactatcgtcaacgcgcgatcaaaattctggccaacagttattacggctattacggttatgcgaaagcccgctggtactgcaaagaatgtgcagaatccgttacggcttggggccgtgaatatatcgaaaccacgatccgcgaaatcgaagaaaaatacggtttcaaagtgctgtacgccgataccgacggcttccatgcaacgatcccgggtgaagatgctgaagaaattaagaaaaaagcgaaagaattcctgaaatacatcaacagcaaactgccgggcgccctggaactggaatatgaaggcttctaccgtcgcggctttttcgtgaccaagaaaaaatacgcagttatcgacgaagaaggcaaaattaccacgcgtggtctggaaatcgtgcgtcgcgattggagtgaaattgccaaagaaacccaggcacgtgttctggaagcactgctgaaagatggtaatgtcgaagaagcagtgagtattgttaaagaagtcacggaaaaactgtccaagtatgaagtcccgccggaaaaactggtgattcatgaacaaatcacccgcgaactgaaagattacaaggcgacgggcccgcacgtggcaattgctaaacgtctggcagcgcgtggcgttaagatccgtccgggtaccgttattagctatatcgtcctgaaaggctctggtcgtattggtgaccgcgccatcccgtttgatgaattcgacccggctaaacaccgctacgatgcggaatattacattgaaaatcaggtcctgccggctgtggaacgtatcctgaaagcgtttggctatcgtaaggaagatctgcgctaccagaaaacccgtcaagtgggcctgggtgcgtggctgaaaccgaagggtaaaaagtaa

SEQ ID NO: 113 - DNA, 2328 bp, Artificial Sequence
  Synthetic
atgattctggacacggactatattacggaagatggcaagccggttatccgcattttcaagaaggaaaatggcgaattcaagatcgaatatgatcgtgaatttgaaccgtatatctacgctctgctgaaagatgacagcgcgatcgaagaagtgaaaaagattaccgctggccgccatggtcgtgtggttaaggtgaaacgcgcggaaaaagttaaaaagaaatttctgggccgtccgattgaagtgtggaaactgtatttcacccatccgcaggatgttccggccatccgtgacgaaattcgtcgccacagcgcagtcgtggatatctatgaatacgacattccgtttgcgaaacgctatctgatcgataagggcctgattccgatggaaggtgacgaagaactgaagatgatgagcttcgatatcgaaaccctgtatcacgaaggcgaagaattcggcacgggtccgatcctgatgatttcttacgcagacgaaggtgaagctcgtgtcatcacctggaagaaaattgatctgccgtatgtggaagttgtcagcacggaaaaggaaatgatcaaacgctttctgaaggtggttaaggaaaaagatccggacgtgctgattacctataacggtgataattttgacttcgcatacctgaagaaacgttgcgaaaaaatcggcattaagttcacgctgcgtcgcgacggttctgaaccgaaaatccagcgcatgggcgatcgttttgcggtcgaagtgaaaggtcgcattcatttcgatctgtatccggttatccgtcgcaccattaacctgccgacctatacgctggaagcggtttacgaagccgtctttggcaccccgaaggaaaaagtgtacccggaagaaattaccacggcctgggaaacgggcgaaggtctggaacgcgtcgcccgttatagtatggaagatgcaaaagtgacctacgaactgggtcgcgaatttttcccgatggaagcacagctgtcccgtctgatcggccaatcactgtgggatgtgtcgcgcagctctacgggtaacctggttgaatggttcctgctgcgtaaagcgtatgaacgcaacgaactggcgccgaataaaccgtcgggccgcgaatacgatgaacgtcgcgaaggttatgcgggcggttacgttaaagaaccggaacgtggtctgtgggaaaacatcgtgtacctggattacaaaagtctgtatccgtccattatcattacccataacgtgagcccggacacgctgaatcgcgaaggctgcaaagaatacgatgtcgccccgcaagtgggtcacaaattttgtaaagactttccgggcttcattccgtctctgctgggtgatctgctggaagaacgtcagaaaattaaaaagaaaatgaaagcaaccaaagatccgattgagaaaaaactgctggactatcgtcaacgcgcgatcaaaattctggccaacagttattacggctattacggttatgcgaaagcccgctggtactgcaaagaatgtgcagaatccgttacggcttggggccgtgaatatatcgaaaccacgatccgcgaaatcgaagaaaaatacggtttcaaagtgctgtacgccgataccgacggcttccatgcaacgatcccgggtgaagatgctgaagaaattaagaaaaaagcgaaagaattcctgaaatacatcaacagcaaactgccgggcgccctggaactggaatatgaaggcttctaccgtcgcggctttttcgtgaccaagaaaaaatacgcagttatcgacgaagaaggcaaaattaccacgcgtggtctggaaatcgtgcgtcgcgattggagtgaaattgccaaagaaacccaggcacgcgtcctggaagcaatcctgaaagatggtgacgtggaagaagccgtccgtattgtgaaagaagttacggaaaaactgtccaaatatgaagttccgccggaaaaactggtcatccatgaacaaattacccgcgaactgaaagattacaaagcgacgggcccgcacgtcgcaatcgctaaacgtctggcggcgcgtggcgtgaaaattcgtccgggtaccgtgatctcatatattgttctgaaaggctcgggtcgtatcggtgaccgcgctattccgtttgatgaattcgacccgaaaaaacacaaatacgatgcggaatactacatcgaaaaccaggttctgccggccgtcgaacgtattctgcgcgcatttggctaccgtaaagaagatctgcgttatcaaaaaaccaaacaagtgggtctgggtgcgtggctgaaaccgaaaggtaaaaaataa

SEQ ID NO: 114 - DNA, 2325 bp, Artificial Sequence
  Synthetic
atgattctggacacggactatattacggaagatggcaagccggttatccgcattttcaagaaggaaaatggcgaattcaagatcgaatatgatcgtgaatttgaaccgtatatctacgctctgctgaaagatgacagcgcgatcgaagaagtgaaaaagattaccgctggccgccatggtcgtgtggttaaggtgaaacgcgcggaaaaagttaaaaagaaatttctgggccgtccgattgaagtgtggaaactgtatttcacccatccgcaggatgttccggccatccgtgacgaaattcgtcgccacagcgcagtcgtggatatctatgaatacgacattccgtttgcgaaacgctatctgatcgataagggcctgattccgatggaaggtgacgaagaactgaagatgatgagcttcgatatcgaaaccctgtatcacgaaggcgaagaattcggcacgggtccgatcctgatgatttcttacgcagacgaaggtgaagctcgtgtcatcacctggaagaaaattgatctgccgtatgtggaagttgtcagcacggaaaaggaaatgatcaaacgctttctgaaggtggttaaggaaaaagatccggacgtgctgattacctataacggtgataattttgacttcgcatacctgaagaaacgttgcgaaaaaatcggcattaagttcacgctgcgtcgcgacggttctgaaccgaaaatccagcgcatgggcgatcgttttgcggtcgaagtgaaaggtcgcattcatttcgatctgtatccggttatccgtcgcaccattaacctgccgacctatacgctggaagcggtttacgaagccgtctttggcaccccgaaggaaaaagtgtacccggaagaaattaccacggcctgggaaacgggcgaaggtctggaacgcgtcgcccgttatagtatggaagatgcaaaagtgacctacgaactgggtcgcgaatttttcccgatggaagcacagctgtcccgtctgatcggccaatcactgtgggatgtgtcgcgcagctctacgggtaacctggttgaatggttcctgctgcgtaaagcgtatgaacgcaacgaactggcgccgaataaaccgtcgggccgcgaatacgatgaacgtcgcgaaggttatgcgggcggttacgttaaagaaccggaacgtggtctgtgggaaaacatcgtgtacctggattacaaaagtctgtatccgtccattatcattacccataacgtgagcccggacacgctgaatcgcgaaggctgcaaagaatacgatgtcgccccgcaagtgggtcacaaattttgtaaagactttccgggcttcattccgtctctgctgggtgatctgctggaagaacgtcagaaaattaaaaagaaaatgaaagcaaccaaagatccgattgagaaaaaactgctggactatcgtcaacgcgcgatcaaaattctggccaacagttattacggctattacggttatgcgaaagcccgctggtactgcaaagaatgtgcagaatccgttacggcttggggccgtgaatatatcgaaaccacgatccgcgaaatcgaagaaaaatacggtttcaaagtgctgtacgccgataccgacggcttccatgcaacgatcccgggtgaagatgctgaagaaattaagaaaaaagcgaaagaattcctgaaatacatcaacagcaaactgccgggcgccctggaactggaatatgaaggcttctaccgtcgcggctttttcgtgaccaagaaaaaatacgcagttatcgacgaagaaggcaaaattaccacgcgtggtctggaaatcgtgcgtcgcgattggagtgaaattgccaaagaaacccaggcacgtgttctggaagcaattctgaaacatggtaacgtcgaagaagcggtcaaaatcgtgaaagaagttacggaaaaactgtctaactacgaaattccgccggaaaaactggccatctacgaacaaattacccgcccgctgcatgaatataaagcaatcggtccgcacgtcgcagtggcaaaacgtctggcagcacgcggcgttaaagtcaaaccgggtatggtcatcggctatattgtgctgcgtggtgatggcccgatcagcaaccgcgcaattctggctgaagaatacgatctgaaaaaacacaaatacgacgccgaatattacatcgaaaatcaggttctgccggctgtcctgcgtattctggaagcgtttggctatcgtaaagaagatctgcgctggcagaaaacccgtcaaacgggtctgacctcatggctgaatattaaaaaatcgtaa

SEQ ID NO: 115 - DNA, 2325 bp, Artificial Sequence
  Synthetic
atgattctggacacggactatattacggaagatggcaagccggttatccgcattttcaagaaggaaaatggcgaattcaagatcgaatatgatcgtgaatttgaaccgtatatctacgctctgctgaaagatgacagcgcgatcgaagaagtgaaaaagattaccgctggccgccatggtcgtgtggttaaggtgaaacgcgcggaaaaagttaaaaagaaatttctgggccgtccgattgaagtgtggaaactgtatttcacccatccgcaggatgttccggccatccgtgacgaaattcgtcgccacagcgcagtcgtggatatctatgaatacgacattccgtttgcgaaacgctatctgatcgataagggcctgattccgatggaaggtgacgaagaactgaagatgatgagcttcgatatcgaaaccctgtatcacgaaggcgaagaattcggcacgggtccgatcctgatgatttcttacgcagacgaaggtgaagctcgtgtcatcacctggaagaaaattgatctgccgtatgtggaagttgtcagcacggaaaaggaaatgatcaaacgctttctgaaggtggttaaggaaaaagatccggacgtgctgattacctataacggtgataattttgacttcgcatacctgaagaaacgttgcgaaaaaatcggcattaagttcacgctgcgtcgcgacggttctgaaccgaaaatccagcgcatgggcgatcgttttgcggtcgaagtgaaaggtcgcattcatttcgatctgtatccggttatccgtcgcaccattaacctgccgacctatacgctggaagcggtttacgaagccgtctttggcaccccgaaggaaaaagtgtacccggaagaaattaccacggcctgggaaacgggcgaaggtctggaacgcgtcgcccgttatagtatggaagatgcaaaagtgacctacgaactgggtcgcgaatttttcccgatggaagcacagctgtcccgtctgatcggccaatcactgtgggatgtgtcgcgcagctctacgggtaacctggttgaatggttcctgctgcgtaaagcgtatgaacgcaacgaactggcgccgaataaaccgtcgggccgcgaatacgatgaacgtcgcgaaggttatgcgggcggttacgttaaagaaccggaacgtggtctgtgggaaaacatcgtgtacctggattacaaaagtctgtatccgtccattatcattacccataacgtgagcccggacacgctgaatcgcgaaggctgcaaagaatacgatgtcgccccgcaagtgggtcacaaattttgtaaagactttccgggcttcattccgtctctgctgggtgatctgctggaagaacgtcagaaaattaaaaagaaaatgaaagcaaccaaagatccgattgagaaaaaactgctggactatcgtcaacgcgcgatcaaaattctggccaacagttattacggctattacggttatgcgaaagcccgctggtactgcaaagaatgtgcagaatccgttacggcttggggccgtgaatatatcgaaaccacgatccgcgaaatcgaagaaaaatacggtttcaaagtgctgtacgccgataccgacggcttccatgcaacgatcccgggtgaagatgctgaagaaattaagaaaaaagcgaaagaattcctgaaatacatcaacagcaaactgccgggcgccctggaactggaatatgaaggcttctaccgtcgcggctttttcgtgaccaagaaaaaatacgcagttatcgacgaagaaggcaaaattaccacgcgtggtctggaaatcgtgcgtcgcgattggagtgaaattgccaaagaaacccaggcaaaagttctggaagcaatcctgaaacatggtaatgtcgaagaagcagtgaaaattgtcaaggaagtgacggaaaaactgtcgaagtatgaaatcccgccggaaaaactggtgatctacgaacaaattacccgcccgctgcatgaatataaagcgattggcccgcacgtggcagttgctaaacgtctggcagcccgcggtgtcaaagtgcgtccgggcatggtgatcggttatattgttctgcgtggcgatggtccgatcagtaaacgcgcgattctggccgaagaatttgatccgcgcaaacacaagtacgacgccgaatattacatcgaaaaccaggtgctgccggctgttctgcgtattctggaagcgttcggctatcgtaaagaagatctgcgctggcagaaaaccaagcaaacgggtctgaccgcatggctgaatgtgaaaaagaaataa

SEQ ID NO: 116 - DNA, 2331 bp, Artificial Sequence
  Synthetic
atgattctggacacggactatattacggaagatggcaagccggttatccgcattttcaagaaggaaaatggcgaattcaagatcgaatatgatcgtgaatttgaaccgtatatctacgctctgctgaaagatgacagcgcgatcgaagaagtgaaaaagattaccgctggccgccatggtcgtgtggttaaggtgaaacgcgcggaaaaagttaaaaagaaatttctgggccgtccgattgaagtgtggaaactgtatttcacccatccgcaggatgttccggccatccgtgacgaaattcgtcgccacagcgcagtcgtggatatctatgaatacgacattccgtttgcgaaacgctatctgatcgataagggcctgattccgatggaaggtgacgaagaactgaagatgatgagcttcgatatcgaaaccctgtatcacgaaggcgaagaattcggcacgggtccgatcctgatgatttcttacgcagacgaaggtgaagctcgtgtcatcacctggaagaaaattgatctgccgtatgtggaagttgtcagcacggaaaaggaaatgatcaaacgctttctgaaggtggttaaggaaaaagatccggacgtgctgattacctataacggtgataattttgacttcgcatacctgaagaaacgttgcgaaaaaatcggcattaagttcacgctgcgtcgcgacggttctgaaccgaaaatccagcgcatgggcgatcgttttgcggtcgaagtgaaaggtcgcattcatttcgatctgtatccggttatccgtcgcaccattaacctgccgacctatacgctggaagcggtttacgaagccgtctttggcaccccgaaggaaaaagtgtacccggaagaaattaccacggcctgggaaacgggcgaaggtctggaacgcgtcgcccgttatagtatggaagatgcaaaagtgacctacgaactgggtcgcgaatttttcccgatggaagcacagctgtcccgtctgatcggccaatcactgtgggatgtgtcgcgcagctctacgggtaacctggttgaatggttcctgctgcgtaaagcgtatgaacgcaacgaactggcaccgaataaaccggatgaacgtgaatatgaacgtcgcctgcgcgaatcttatgccggcggttacgttaaggaaccggaaaaaggcctgtgggaaggtctggtgtctctggattttcgctcactgtacccgtcgattatcattacgcataacgtgtccccggacaccctgaatcgtgaaggctgcatggaatatgatgttgctccggaagtcaaacacaagttttgtaaagactttccgggtttcattccgtcactgctgaaacgtctgctggatgaacgccaggaaatcaaacgtcgcatgaaagcctcgaaggatccgattgaaaagaaaatgctggactatcgtcaacgcgcaatcaaaattctggctaatagctattacggctattacggttatgcgaaggcccgctggtactgcaaagaatgtgcggaatctgtcacggcctggggccgtgaatatatcgaatttgtgcgcaaagaactggaagaaaagttcggtttcaaggttctgtacattgatacggacggcctgtacgcaaccatcccgggtgctaaaccggaagaaattaagcgtaaggccctggaatttgtggaatacatcaacgcaaaactgccgggcctgctggaactggaatatgaaggcttctacgttcgcggctttttcgtcacgaagaaaaagtatgcgctgattgacgaagaaggcaaaatcattacccgtggtctggaaatcgttcgtcgcgattggagtgaaattgccaaagaaacccaggcacgcgttctggaagcaatcctgcgtcatggtgacgtcgaagaagccgttcgcattgtcaaagatgtgacggaaaagctgtcgaaatatgaagtcccgccggaaaaactggtgatccatgaacaaattacccgtgaactgaaggattacaaagcgacgggcccgcacgttgcaattgctaaacgcctggcagcccgtggcatcaagattcgtccgggtaccgttatcagctatattgtcctgaaaggctctggtcgcatcggtgatcgtgctattccgtttgatgaattcgacccgacgaaacaccgttacgatgccgaatattacatcgaaaatcaggtgctgccggccgttgaacgcattctgaaagcatttggctataagaaagaagaactgcgctaccagaaaacccgtcaagtgggcctgggtgcgtggctgaagctgaaaggtaagaaataa

SEQ ID NO: 117 - DNA, 2325 bp, Artificial Sequence
  Synthetic
atgattctggacacggactatattacggaagatggcaagccggttatccgcattttcaagaaggaaaatggcgaattcaagatcgaatatgatcgtgaatttgaaccgtatatctacgctctgctgaaagatgacagcgcgatcgaagaagtgaaaaagattaccgctggccgccatggtcgtgtggttaaggtgaaacgcgcggaaaaagttaaaaagaaatttctgggccgtccgattgaagtgtggaaactgtatttcacccatccgcaggatgttccggccatccgtgacgaaattcgtcgccacagcgcagtcgtggatatctatgaatacgacattccgtttgcgaaacgctatctgatcgataagggcctgattccgatggaaggtgacgaagaactgaagatgatgagcttcgatatcgaaaccctgtatcacgaaggcgaagaattcggcacgggtccgatcctgatgatttcttacgcagacgaaggtgaagctcgtgtcatcacctggaagaaaattgatctgccgtatgtggaagttgtcagcacggaaaaggaaatgatcaaacgctttctgaaggtggttaaggaaaaagatccggacgtgctgattacctataacggtgataattttgacttcgcatacctgaagaaacgttgcgaaaaaatcggcattaagttcacgctgcgtcgcgacggttctgaaccgaaaatccagcgcatgggcgatcgttttgcggtcgaagtgaaaggtcgcattcatttcgatctgtatccggttatccgtcgcaccattaacctgccgacctatacgctggaagcggtttacgaagccgtctttggcaccccgaaggaaaaagtgtacccggaagaaattaccacggcctgggaaacgggcgaaggtctggaacgcgtcgcccgttatagtatggaagatgcaaaagtgacctacgaactgggtcgcgaatttttcccgatggaagcacagctgtcccgtctgatcggccaatcactgtgggatgtgtcgcgcagctctacgggtaacctggttgaatggttcctgctgcgtaaagcgtatgaacgcaacgaactggcaccgaataaaccggatgaacgtgaatatgaacgtcgcctgcgcgaatcttatgccggcggttacgttaaggaaccggaaaaaggcctgtgggaaggtctggtgtctctggattttcgctcactgtacccgtcgattatcattacgcataacgtgtccccggacaccctgaatcgtgaaggctgcatggaatatgatgttgctccggaagtcaaacacaagttttgtaaagactttccgggtttcattccgtcactgctgaaacgtctgctggatgaacgccaggaaatcaaacgtcgcatgaaagcctcgaaggatccgattgaaaagaaaatgctggactatcgtcaacgcgcaatcaaaattctggctaatagctattacggctattacggttatgcgaaggcccgctggtactgcaaagaatgtgcggaatctgtcacggcctggggccgtgaatatatcgaatttgtgcgcaaagaactggaagaaaagttcggtttcaaggttctgtacattgatacggacggcctgtacgcaaccatcccgggtgctaaaccggaagaaattaagcgtaaggccctggaatttgtggaatacatcaacgcaaaactgccgggcctgctggaactggaatatgaaggcttctacgttcgcggctttttcgtcacgaagaaaaagtatgcgctgattgacgaagaaggcaaaatcattacccgtggtctggaaatcgttcgtcgcgattggagtgaaattgccaaagaaacccaggcacgtgtcctggaagcaatcctgaaacatggtgatgtggaagaagcggttcgcattgtcaaagaagtgacggaaaagctgtcgaaatatgaagttccgccggaaaaactggtcatccatgaacaaattacccgcgatctgcgtgactacaaagccacgggtccgcacgtggcagttgcaaaacgtctggcagcccgtggcgtgaagattcgtccgggtaccgtgatcagttatattgttctgaaaggctccggtcgcatcggtgaccgtgctattccgtttgatgaattcgacccgacgaaacaccgttacgatgccgaatattacatcgaaaatcaggtcctgccggccgtggaacgcattctgaaagcatttggttatcgcaaggaagatctgcgttaccagaagaccaaacaagtcggcctgggtgcgtggctgaaagtgaaaaagtaa

SEQ ID NO: 118 - DNA, 2331 bp, Artificial Sequence
  Synthetic
atgattctggacacggactatattacggaagatggcaagccggttatccgcattttcaagaaggaaaatggcgaattcaagatcgaatatgatcgtgaatttgaaccgtatatctacgctctgctgaaagatgacagcgcgatcgaagaagtgaaaaagattaccgctggccgccatggtcgtgtggttaaggtgaaacgcgcggaaaaagttaaaaagaaatttctgggccgtccgattgaagtgtggaaactgtatttcacccatccgcaggatgttccggccatccgtgacgaaattcgtcgccacagcgcagtcgtggatatctatgaatacgacattccgtttgcgaaacgctatctgatcgataagggcctgattccgatggaaggtgacgaagaactgaagatgatgagcttcgatatcgaaaccctgtatcacgaaggcgaagaattcggcacgggtccgatcctgatgatttcttacgcagacgaaggtgaagctcgtgtcatcacctggaagaaaattgatctgccgtatgtggaagttgtcagcacggaaaaggaaatgatcaaacgctttctgaaggtggttaaggaaaaagatccggacgtgctgattacctataacggtgataattttgacttcgcatacctgaagaaacgttgcgaaaaaatcggcattaagttcacgctgcgtcgcgacggttctgaaccgaaaatccagcgcatgggcgatcgttttgcggtcgaagtgaaaggtcgcattcatttcgatctgtatccggttatccgtcgcaccattaacctgccgacctatacgctggaagcggtttacgaagccgtctttggcaccccgaaggaaaaagtgtacccggaagaaattaccacggcctgggaaacgggcgaaggtctggaacgcgtcgcccgttatagtatggaagatgcaaaagtgacctacgaactgggtcgcgaatttttcccgatggaagcacagctgtcccgtctgatcggccaatcactgtgggatgtgtcgcgcagctctacgggtaacctggttgaatggttcctgctgcgtaaagcgtatgaacgcaacgaactggcaccgaataaaccggatgaacgtgaatatgaacgtcgcctgcgcgaatcttatgccggcggttacgttaaggaaccggaaaaaggcctgtgggaaggtctggtgtctctggattttcgctcactgtacccgtcgattatcattacgcataacgtgtccccggacaccctgaatcgtgaaggctgcatggaatatgatgttgctccggaagtcaaacacaagttttgtaaagactttccgggtttcattccgtcactgctgaaacgtctgctggatgaacgccaggaaatcaaacgtcgcatgaaagcctcgaaggatccgattgaaaagaaaatgctggactatcgtcaacgcgcaatcaaaattctggctaatagctattacggctattacggttatgcgaaggcccgctggtactgcaaagaatgtgcggaatctgtcacggcctggggccgtgaatatatcgaatttgtgcgcaaagaactggaagaaaagttcggtttcaaggttctgtacattgatacggacggcctgtacgcaaccatcccgggtgctaaaccggaagaaattaagcgtaaggccctggaatttgtggaatacatcaacgcaaaactgccgggcctgctggaactggaatatgaaggcttctacgttcgcggctttttcgtcacgaagaaaaagtatgcgctgattgacgaagaaggcaaaatcattacccgtggtctggaaatcgttcgtcgcgattggagtgaaattgccaaagaaacccaggcacgtgtgctggaagctctgctgaaagatggcaatgttgaagaagcggtttccattgtcaaagaagtgacggaaaagctgggtaaatatgaagtcccgccggaaaaactggtgatccatgaacaaattacccgcgaactgaaggattacaaagcgacgggcccgcacgttgctatcgcgaaacgtctggcagcgcgtggcgtgaagattcgtccgggtaccgttatcagctatattgtcctgaaaggctctggtcgtatcggtgaccgcgcgattccgtttgatgaattcgacccgacgaaacatcgctacgatgcagaatattacatcgaaaaccaggttctgccggctgtcgaacgtattctgaaagcgtttggctatcgtgccgaagatctgcgctaccagaaaacccgtcaagtgggcctgggtgtttggctgcaaccgaaaggtaagaaataa

SEQ ID NO: 119 - DNA, 2328 bp, Artificial Sequence
  Synthetic
atgattctggacacggactatattacggaagatggcaagccggttatccgcattttcaagaaggaaaatggcgaattcaagatcgaatatgatcgtgaatttgaaccgtatatctacgctctgctgaaagatgacagcgcgatcgaagaagtgaaaaagattaccgctggccgccatggtcgtgtggttaaggtgaaacgcgcggaaaaagttaaaaagaaatttctgggccgtccgattgaagtgtggaaactgtatttcacccatccgcaggatgttccggccatccgtgacgaaattcgtcgccacagcgcagtcgtggatatctatgaatacgacattccgtttgcgaaacgctatctgatcgataagggcctgattccgatggaaggtgacgaagaactgaagatgatgagcttcgatatcgaaaccctgtatcacgaaggcgaagaattcggcacgggtccgatcctgatgatttcttacgcagacgaaggtgaagctcgtgtcatcacctggaagaaaattgatctgccgtatgtggaagttgtcagcacggaaaaggaaatgatcaaacgctttctgaaggtggttaaggaaaaagatccggacgtgctgattacctataacggtgataattttgacttcgcatacctgaagaaacgttgcgaaaaaatcggcattaagttcacgctgcgtcgcgacggttctgaaccgaaaatccagcgcatgggcgatcgttttgcggtcgaagtgaaaggtcgcattcatttcgatctgtatccggttatccgtcgcaccattaacctgccgacctatacgctggaagcggtttacgaagccgtctttggcaccccgaaggaaaaagtgtacccggaagaaattaccacggcctgggaaacgggcgaaggtctggaacgcgtcgcccgttatagtatggaagatgcaaaagtgacctacgaactgggtcgcgaatttttcccgatggaagcacagctgtcccgtctgatcggccaatcactgtgggatgtgtcgcgcagctctacgggtaacctggttgaatggttcctgctgcgtaaagcgtatgaacgcaacgaactggcaccgaataaaccggatgaacgtgaatatgaacgtcgcctgcgcgaatcttatgccggcggttacgttaaggaaccggaaaaaggcctgtgggaaggtctggtgtctctggattttcgctcactgtacccgtcgattatcattacgcataacgtgtccccggacaccctgaatcgtgaaggctgcatggaatatgatgttgctccggaagtcaaacacaagttttgtaaagactttccgggtttcattccgtcactgctgaaacgtctgctggatgaacgccaggaaatcaaacgtcgcatgaaagcctcgaaggatccgattgaaaagaaaatgctggactatcgtcaacgcgcaatcaaaattctggctaatagctattacggctattacggttatgcgaaggcccgctggtactgcaaagaatgtgcggaatctgtcacggcctggggccgtgaatatatcgaatttgtgcgcaaagaactggaagaaaagttcggtttcaaggttctgtacattgatacggacggcctgtacgcaaccatcccgggtgctaaaccggaagaaattaagcgtaaggccctggaatttgtggaatacatcaacgcaaaactgccgggcctgctggaactggaatatgaaggcttctacgttcgcggctttttcgtcacgaagaaaaagtatgcgctgattgacgaagaaggcaaaatcattacccgtggtctggaaatcgttcgtcgcgattggagtgaaattgccaaagaaacccaggcaaaggttctggaagcaattctgaaacatggtaacgtcgaagaagcggtcaagatcgtgaaagaagttaccgaaaaactgtcgaattatgaaattccggtcgaaaagctggtgatctacgaacaaattacgcgcccgctgaacgaatataaagccattggcccgcacgtggcagttgctaaacgtctggcggccaagggtatcaagattaaaccgggcatggtgattggttatgttgtcctgcgcggcgatggtccgatcagcaaacgtgcgatcgccatcgaagaattcgatggcaaaaagcataagtacgacgcagaatactacatcgaaaatcaggttctgccggccgtcgaacgtatcctgaaagcattcggttataagcgtgaagatctgcgctggcagaagaccaaacaagtgggcctgggtgcgtggctgaaagttaaaaagtcttaa

SEQ ID NO: 120 - DNA, 2331 bp, Artificial Sequence
  Synthetic
atgattctggacacggactatattacggaagatggcaagccggttatccgcattttcaagaaggaaaatggcgaattcaagatcgaatatgatcgtgaatttgaaccgtatatctacgctctgctgaaagatgacagcgcgatcgaagaagtgaaaaagattaccgctggccgccatggtcgtgtggttaaggtgaaacgcgcggaaaaagttaaaaagaaatttctgggccgtccgattgaagtgtggaaactgtatttcacccatccgcaggatgttccggccatccgtgacgaaattcgtcgccacagcgcagtcgtggatatctatgaatacgacattccgtttgcgaaacgctatctgatcgataagggcctgattccgatggaaggtgacgaagaactgaagatgatgagcttcgatatcgaaaccctgtatcacgaaggcgaagaattcggcacgggtccgatcctgatgatttcttacgcagacgaaggtgaagctcgtgtcatcacctggaagaaaattgatctgccgtatgtggaagttgtcagcacggaaaaggaaatgatcaaacgctttctgaaggtggttaaggaaaaagatccggacgtgctgattacctataacggtgataattttgacttcgcatacctgaagaaacgttgcgaaaaaatcggcattaagttcacgctgcgtcgcgacggttctgaaccgaaaatccagcgcatgggcgatcgttttgcggtcgaagtgaaaggtcgcattcatttcgatctgtatccggttatccgtcgcaccattaacctgccgacctatacgctggaagcggtttacgaagccgtctttggcaccccgaaggaaaaagtgtacccggaagaaattaccacggcctgggaaacgggcgaaggtctggaacgcgtcgcccgttatagtatggaagatgcaaaagtgacctacgaactgggtcgcgaatttttcccgatggaagcacagctgtcccgtctgatcggccaatcactgtgggatgtgtcgcgcagctctacgggtaacctggttgaatggttcctgctgcgtaaagcgtatgaacgcaacgaactggcaccgaataaaccggatgaacgtgaatatgaacgtcgcctgcgcgaatcttatgccggcggttacgttaaggaaccggaaaaaggcctgtgggaaggtctggtgtctctggattttcgctcactgtacccgtcgattatcattacgcataacgtgtccccggacaccctgaatcgtgaaggctgcatggaatatgatgttgctccggaagtcaaacacaagttttgtaaagactttccgggtttcattccgtcactgctgaaacgtctgctggatgaacgccaggaaatcaaacgtcgcatgaaagcctcgaaggatccgattgaaaagaaaatgctggactatcgtcaacgcgcaatcaaaattctggctaatagctattacggctattacggttatgcgaaggcccgctggtactgcaaagaatgtgcggaatctgtcacggcctggggccgtgaatatatcgaatttgtgcgcaaagaactggaagaaaagttcggtttcaaggttctgtacattgatacggacggcctgtacgcaaccatcccgggtgctaaaccggaagaaattaagcgtaaggccctggaatttgtggaatacatcaacgcaaaactgccgggcctgctggaactggaatatgaaggcttctacgttcgcggctttttcgtcacgaagaaaaagtatgcgctgattgacgaagaaggcaaaatcattacccgtggtctggaaatcgttcgtcgcgattggagtgaaattgccaaagaaacccaggcacgtgttctggaagcactgctgaaagatggtaatgtcgaagaagcagtgagtattgttaaagaagtcacggaaaaactgtccaagtatgaagtcccgccggaaaaactggtgattcatgaacaaatcacccgcgaactgaaagattacaaggcgacgggcccgcacgtggcaattgctaaacgtctggcagcgcgtggcgttaagatccgtccgggtaccgttattagctatatcgtcctgaaaggctctggtcgtattggtgaccgcgccatcccgtttgatgaattcgacccggctaaacaccgctacgatgcggaatattacattgaaaatcaggtcctgccggctgtggaacgtatcctgaaagcgtttggctatcgtaaggaagatctgcgctaccagaaaacccgtcaagtgggcctgggtgcgtggctgaaaccgaagggtaaaaagtaa

SEQ ID NO: 121 - DNA, 2331 bp, Artificial Sequence
  Synthetic
atgattctggacacggactatattacggaagatggcaagccggttatccgcattttcaagaaggaaaatggcgaattcaagatcgaatatgatcgtgaatttgaaccgtatatctacgctctgctgaaagatgacagcgcgatcgaagaagtgaaaaagattaccgctggccgccatggtcgtgtggttaaggtgaaacgcgcggaaaaagttaaaaagaaatttctgggccgtccgattgaagtgtggaaactgtatttcacccatccgcaggatgttccggccatccgtgacgaaattcgtcgccacagcgcagtcgtggatatctatgaatacgacattccgtttgcgaaacgctatctgatcgataagggcctgattccgatggaaggtgacgaagaactgaagatgatgagcttcgatatcgaaaccctgtatcacgaaggcgaagaattcggcacgggtccgatcctgatgatttcttacgcagacgaaggtgaagctcgtgtcatcacctggaagaaaattgatctgccgtatgtggaagttgtcagcacggaaaaggaaatgatcaaacgctttctgaaggtggttaaggaaaaagatccggacgtgctgattacctataacggtgataattttgacttcgcatacctgaagaaacgttgcgaaaaaatcggcattaagttcacgctgcgtcgcgacggttctgaaccgaaaatccagcgcatgggcgatcgttttgcggtcgaagtgaaaggtcgcattcatttcgatctgtatccggttatccgtcgcaccattaacctgccgacctatacgctggaagcggtttacgaagccgtctttggcaccccgaaggaaaaagtgtacccggaagaaattaccacggcctgggaaacgggcgaaggtctggaacgcgtcgcccgttatagtatggaagatgcaaaagtgacctacgaactgggtcgcgaatttttcccgatggaagcacagctgtcccgtctgatcggccaatcactgtgggatgtgtcgcgcagctctacgggtaacctggttgaatggttcctgctgcgtaaagcgtatgaacgcaacgaactggcaccgaataaaccggatgaacgtgaatatgaacgtcgcctgcgcgaatcttatgccggcggttacgttaaggaaccggaaaaaggcctgtgggaaggtctggtgtctctggattttcgctcactgtacccgtcgattatcattacgcataacgtgtccccggacaccctgaatcgtgaaggctgcatggaatatgatgttgctccggaagtcaaacacaagttttgtaaagactttccgggtttcattccgtcactgctgaaacgtctgctggatgaacgccaggaaatcaaacgtcgcatgaaagcctcgaaggatccgattgaaaagaaaatgctggactatcgtcaacgcgcaatcaaaattctggctaatagctattacggctattacggttatgcgaaggcccgctggtactgcaaagaatgtgcggaatctgtcacggcctggggccgtgaatatatcgaatttgtgcgcaaagaactggaagaaaagttcggtttcaaggttctgtacattgatacggacggcctgtacgcaaccatcccgggtgctaaaccggaagaaattaagcgtaaggccctggaatttgtggaatacatcaacgcaaaactgccgggcctgctggaactggaatatgaaggcttctacgttcgcggctttttcgtcacgaagaaaaagtatgcgctgattgacgaagaaggcaaaatcattacccgtggtctggaaatcgttcgtcgcgattggagtgaaattgccaaagaaacccaggcacgcgtcctggaagcaatcctgaaagatggtgacgtggaagaagccgtccgtattgtgaaagaagttacggaaaaactgtccaaatatgaagttccgccggaaaaactggtcatccatgaacaaattacccgcgaactgaaagattacaaagcgacgggcccgcacgtcgcaatcgctaaacgtctggcggcgcgtggcgtgaaaattcgtccgggtaccgtgatctcatatattgttctgaaaggctcgggtcgtatcggtgaccgcgctattccgtttgatgaattcgacccgaaaaaacacaaatacgatgcggaatactacatcgaaaaccaggttctgccggccgtcgaacgtattctgcgcgcatttggctaccgtaaagaagatctgcgttatcaaaaaaccaaacaagtgggtctgggtgcgtggctgaaaccgaaaggtaaaaaataa

SEQ ID NO: 122 - DNA, 2328 bp, Artificial Sequence
  Synthetic
atgattctggacacggactatattacggaagatggcaagccggttatccgcattttcaagaaggaaaatggcgaattcaagatcgaatatgatcgtgaatttgaaccgtatatctacgctctgctgaaagatgacagcgcgatcgaagaagtgaaaaagattaccgctggccgccatggtcgtgtggttaaggtgaaacgcgcggaaaaagttaaaaagaaatttctgggccgtccgattgaagtgtggaaactgtatttcacccatccgcaggatgttccggccatccgtgacgaaattcgtcgccacagcgcagtcgtggatatctatgaatacgacattccgtttgcgaaacgctatctgatcgataagggcctgattccgatggaaggtgacgaagaactgaagatgatgagcttcgatatcgaaaccctgtatcacgaaggcgaagaattcggcacgggtccgatcctgatgatttcttacgcagacgaaggtgaagctcgtgtcatcacctggaagaaaattgatctgccgtatgtggaagttgtcagcacggaaaaggaaatgatcaaacgctttctgaaggtggttaaggaaaaagatccggacgtgctgattacctataacggtgataattttgacttcgcatacctgaagaaacgttgcgaaaaaatcggcattaagttcacgctgcgtcgcgacggttctgaaccgaaaatccagcgcatgggcgatcgttttgcggtcgaagtgaaaggtcgcattcatttcgatctgtatccggttatccgtcgcaccattaacctgccgacctatacgctggaagcggtttacgaagccgtctttggcaccccgaaggaaaaagtgtacccggaagaaattaccacggcctgggaaacgggcgaaggtctggaacgcgtcgcccgttatagtatggaagatgcaaaagtgacctacgaactgggtcgcgaatttttcccgatggaagcacagctgtcccgtctgatcggccaatcactgtgggatgtgtcgcgcagctctacgggtaacctggttgaatggttcctgctgcgtaaagcgtatgaacgcaacgaactggcaccgaataaaccggatgaacgtgaatatgaacgtcgcctgcgcgaatcttatgccggcggttacgttaaggaaccggaaaaaggcctgtgggaaggtctggtgtctctggattttcgctcactgtacccgtcgattatcattacgcataacgtgtccccggacaccctgaatcgtgaaggctgcatggaatatgatgttgctccggaagtcaaacacaagttttgtaaagactttccgggtttcattccgtcactgctgaaacgtctgctggatgaacgccaggaaatcaaacgtcgcatgaaagcctcgaaggatccgattgaaaagaaaatgctggactatcgtcaacgcgcaatcaaaattctggctaatagctattacggctattacggttatgcgaaggcccgctggtactgcaaagaatgtgcggaatctgtcacggcctggggccgtgaatatatcgaatttgtgcgcaaagaactggaagaaaagttcggtttcaaggttctgtacattgatacggacggcctgtacgcaaccatcccgggtgctaaaccggaagaaattaagcgtaaggccctggaatttgtggaatacatcaacgcaaaactgccgggcctgctggaactggaatatgaaggcttctacgttcgcggctttttcgtcacgaagaaaaagtatgcgctgattgacgaagaaggcaaaatcattacccgtggtctggaaatcgttcgtcgcgattggagtgaaattgccaaagaaacccaggcacgtgttctggaagcaattctgaaacatggtaacgtcgaagaagcggtcaaaatcgtgaaagaagttacggaaaaactgtctaactacgaaattccgccggaaaaactggccatctacgaacaaattacccgcccgctgcatgaatataaagcaatcggtccgcacgtcgcagtggcaaaacgtctggcagcacgcggcgttaaagtcaaaccgggtatggtcatcggctatattgtgctgcgtggtgatggcccgatcagcaaccgcgcaattctggctgaagaatacgatctgaaaaaacacaaatacgacgccgaatattacatcgaaaatcaggttctgccggctgtcctgcgtattctggaagcgtttggctatcgtaaagaagatctgcgctggcagaaaacccgtcaaacgggtctgacctcatggctgaatattaaaaaatcgtaa

SEQ ID NO: 123 - DNA, 2328 bp, Artificial Sequence
  Synthetic
atgattctggacacggactatattacggaagatggcaagccggttatccgcattttcaagaaggaaaatggcgaattcaagatcgaatatgatcgtgaatttgaaccgtatatctacgctctgctgaaagatgacagcgcgatcgaagaagtgaaaaagattaccgctggccgccatggtcgtgtggttaaggtgaaacgcgcggaaaaagttaaaaagaaatttctgggccgtccgattgaagtgtggaaactgtatttcacccatccgcaggatgttccggccatccgtgacgaaattcgtcgccacagcgcagtcgtggatatctatgaatacgacattccgtttgcgaaacgctatctgatcgataagggcctgattccgatggaaggtgacgaagaactgaagatgatgagcttcgatatcgaaaccctgtatcacgaaggcgaagaattcggcacgggtccgatcctgatgatttcttacgcagacgaaggtgaagctcgtgtcatcacctggaagaaaattgatctgccgtatgtggaagttgtcagcacggaaaaggaaatgatcaaacgctttctgaaggtggttaaggaaaaagatccggacgtgctgattacctataacggtgataattttgacttcgcatacctgaagaaacgttgcgaaaaaatcggcattaagttcacgctgcgtcgcgacggttctgaaccgaaaatccagcgcatgggcgatcgttttgcggtcgaagtgaaaggtcgcattcatttcgatctgtatccggttatccgtcgcaccattaacctgccgacctatacgctggaagcggtttacgaagccgtctttggcaccccgaaggaaaaagtgtacccggaagaaattaccacggcctgggaaacgggcgaaggtctggaacgcgtcgcccgttatagtatggaagatgcaaaagtgacctacgaactgggtcgcgaatttttcccgatggaagcacagctgtcccgtctgatcggccaatcactgtgggatgtgtcgcgcagctctacgggtaacctggttgaatggttcctgctgcgtaaagcgtatgaacgcaacgaactggcaccgaataaaccggatgaacgtgaatatgaacgtcgcctgcgcgaatcttatgccggcggttacgttaaggaaccggaaaaaggcctgtgggaaggtctggtgtctctggattttcgctcactgtacccgtcgattatcattacgcataacgtgtccccggacaccctgaatcgtgaaggctgcatggaatatgatgttgctccggaagtcaaacacaagttttgtaaagactttccgggtttcattccgtcactgctgaaacgtctgctggatgaacgccaggaaatcaaacgtcgcatgaaagcctcgaaggatccgattgaaaagaaaatgctggactatcgtcaacgcgcaatcaaaattctggctaatagctattacggctattacggttatgcgaaggcccgctggtactgcaaagaatgtgcggaatctgtcacggcctggggccgtgaatatatcgaatttgtgcgcaaagaactggaagaaaagttcggtttcaaggttctgtacattgatacggacggcctgtacgcaaccatcccgggtgctaaaccggaagaaattaagcgtaaggccctggaatttgtggaatacatcaacgcaaaactgccgggcctgctggaactggaatatgaaggcttctacgttcgcggctttttcgtcacgaagaaaaagtatgcgctgattgacgaagaaggcaaaatcattacccgtggtctggaaatcgttcgtcgcgattggagtgaaattgccaaagaaacccaggcaaaagttctggaagcaatcctgaaacatggtaatgtcgaagaagcagtgaaaattgtcaaggaagtgacggaaaaactgtcgaagtatgaaatcccgccggaaaaactggtgatctacgaacaaattacccgcccgctgcatgaatataaagcgattggcccgcacgtggcagttgctaaacgtctggcagcccgcggtgtcaaagtgcgtccgggcatggtgatcggttatattgttctgcgtggcgatggtccgatcagtaaacgcgcgattctggccgaagaatttgatccgcgcaaacacaagtacgacgccgaatattacatcgaaaaccaggtgctgccggctgttctgcgtattctggaagcgttcggctatcgtaaagaagatctgcgctggcagaaaaccaagcaaacgggtctgaccgcatggctgaatgtgaaaaagaaataa

SEQ ID NO: 124 - DNA, 2331 bp, Artificial Sequence
  Synthetic
atgattctggacacggactatattacggaagatggcaagccggttatccgcattttcaagaaggaaaatggcgaattcaagatcgaatatgatcgtgaatttgaaccgtatatctacgctctgctgaaagatgacagcgcgatcgaagaagtgaaaaagattaccgctggccgccatggtcgtgtggttaaggtgaaacgcgcggaaaaagttaaaaagaaatttctgggccgtccgattgaagtgtggaaactgtatttcacccatccgcaggatgttccggccatccgtgacgaaattcgtcgccacagcgcagtcgtggatatctatgaatacgacattccgtttgcgaaacgctatctgatcgataagggcctgattccgatggaaggtgacgaagaactgaagatgatgagcttcgatatcgaaaccctgtatcacgaaggcgaagaattcggcacgggtccgatcctgatgatttcttacgcagacgaaggtgaagctcgtgtcatcacctggaagaaaattgatctgccgtatgtggaagttgtcagcacggaaaaggaaatgatcaaacgctttctgaaggtggttaaggaaaaagatccggacgtgctgattacctataacggtgataattttgacttcgcatacctgaagaaacgttgcgaaaaaatcggcattaagttcacgctgcgtcgcgacggttctgaaccgaaaatccagcgcatgggcgatcgttttgcggtcgaagtgaaaggtcgcattcatttcgatctgtatccggttatccgtcgcaccattaacctgccgacctatacgctggaagcggtttacgaagccgtctttggcaccccgaaggaaaaagtgtacccggaagaaattaccacggcctgggaaacgggcgaaggtctggaacgcgtcgcccgttatagtatggaagatgcaaaagtgacctacgaactgggtcgcgaatttttcccgatggaagcacagctgtcccgtctgatcggccaatcactgtgggatgtgtcgcgcagctctacgggtaacctggttgaatggttcctgctgcgtaaagcgtatgaacgcaacgaagtggcaccgaataaaccggatgaacgtgaatatcagcgtcgcctgcgcgaaagttatgcaggcggttacgtgaaagaaccggaaaaaggtctgtgggaaggcctggtttatctggattttcgtgcgctgtacccgagcattatcattacgcataacgtttctccggacaccctgaatcgtgaaggctgccgcgaatatgatattgcgccggaagtgggtcacaaattttgtaaagatatcccgggcttcattccgagcctgctgaaacgtctgctggaagaacgccagaaaatcaaaacgaaaatgaaagaaacccaagatccgatcgaaaaaattctgctggactaccgtcagcgcgcgatcaaaattctggccaacagttattacggttattacggctatgcaaaagctcgctggtactgcaaagaatgtgcagaatccgttaccgcttggggtcgtaaatacatcgaattcgtctggaaagaactggaagaaaaattcggtttcaaagttctgtacatcgatacggacggtctgtacgcaaccatcccgggcggtaaaccggaagaaattaagaaaaaagccctggaatttgtggattacattaatgcaaaactgccgggcctgctggaactggaatatgaaggtttctacgtgcgtggctttttcgttaccaagaaaaaatatgccgtcattgacgaagaaggtaaagtgatcacccgcggcctggaaattgttcgtcgcgattggagtgaaattgccaaagaaacccaggcacgcgttctggaagcaatcctgcgtcatggtgacgtcgaagaagccgttcgcattgtcaaagatgtgacggaaaagctgtcgaaatatgaagtcccgccggaaaaactggtgatccatgaacaaattacccgtgaactgaaggattacaaagcgacgggcccgcacgttgcaattgctaaacgcctggcagcccgtggcatcaagattcgtccgggtaccgttatcagctatattgtcctgaaaggctctggtcgcatcggtgatcgtgctattccgtttgatgaattcgacccgacgaaacaccgttacgatgccgaatattacatcgaaaatcaggtgctgccggccgttgaacgcattctgaaagcatttggctataagaaagaagaactgcgctaccagaaaacccgtcaagtgggcctgggtgcgtggctgaagctgaaaggtaagaaataa

SEQ ID NO: 125 - DNA, 2325 bp, Artificial Sequence
  Synthetic
atgattctggacacggactatattacggaagatggcaagccggttatccgcattttcaagaaggaaaatggcgaattcaagatcgaatatgatcgtgaatttgaaccgtatatctacgctctgctgaaagatgacagcgcgatcgaagaagtgaaaaagattaccgctggccgccatggtcgtgtggttaaggtgaaacgcgcggaaaaagttaaaaagaaatttctgggccgtccgattgaagtgtggaaactgtatttcacccatccgcaggatgttccggccatccgtgacgaaattcgtcgccacagcgcagtcgtggatatctatgaatacgacattccgtttgcgaaacgctatctgatcgataagggcctgattccgatggaaggtgacgaagaactgaagatgatgagcttcgatatcgaaaccctgtatcacgaaggcgaagaattcggcacgggtccgatcctgatgatttcttacgcagacgaaggtgaagctcgtgtcatcacctggaagaaaattgatctgccgtatgtggaagttgtcagcacggaaaaggaaatgatcaaacgctttctgaaggtggttaaggaaaaagatccggacgtgctgattacctataacggtgataattttgacttcgcatacctgaagaaacgttgcgaaaaaatcggcattaagttcacgctgcgtcgcgacggttctgaaccgaaaatccagcgcatgggcgatcgttttgcggtcgaagtgaaaggtcgcattcatttcgatctgtatccggttatccgtcgcaccattaacctgccgacctatacgctggaagcggtttacgaagccgtctttggcaccccgaaggaaaaagtgtacccggaagaaattaccacggcctgggaaacgggcgaaggtctggaacgcgtcgcccgttatagtatggaagatgcaaaagtgacctacgaactgggtcgcgaatttttcccgatggaagcacagctgtcccgtctgatcggccaatcactgtgggatgtgtcgcgcagctctacgggtaacctggttgaatggttcctgctgcgtaaagcgtatgaacgcaacgaagtggcaccgaataaaccggatgaacgtgaatatcagcgtcgcctgcgcgaaagttatgcaggcggttacgtgaaagaaccggaaaaaggtctgtgggaaggcctggtttatctggattttcgtgcgctgtacccgagcattatcattacgcataacgtttctccggacaccctgaatcgtgaaggctgccgcgaatatgatattgcgccggaagtgggtcacaaattttgtaaagatatcccgggcttcattccgagcctgctgaaacgtctgctggaagaacgccagaaaatcaaaacgaaaatgaaagaaacccaagatccgatcgaaaaaattctgctggactaccgtcagcgcgcgatcaaaattctggccaacagttattacggttattacggctatgcaaaagctcgctggtactgcaaagaatgtgcagaatccgttaccgcttggggtcgtaaatacatcgaattcgtctggaaagaactggaagaaaaattcggtttcaaagttctgtacatcgatacggacggtctgtacgcaaccatcccgggcggtaaaccggaagaaattaagaaaaaagccctggaatttgtggattacattaatgcaaaactgccgggcctgctggaactggaatatgaaggtttctacgtgcgtggctttttcgttaccaagaaaaaatatgccgtcattgacgaagaaggtaaagtgatcacccgcggcctggaaattgttcgtcgcgattggagtgaaattgccaaagaaacccaggcacgtgtcctggaagcaatcctgaaacatggtgatgtggaagaagcggttcgcattgtcaaagaagtgacggaaaagctgtcgaaatatgaagttccgccggaaaaactggtcatccatgaacaaattacccgcgatctgcgtgactacaaagccacgggtccgcacgtggcagttgcaaaacgtctggcagcccgtggcgtgaagattcgtccgggtaccgtgatcagttatattgttctgaaaggctccggtcgcatcggtgaccgtgctattccgtttgatgaattcgacccgacgaaacaccgttacgatgccgaatattacatcgaaaatcaggtcctgccggccgtggaacgcattctgaaagcatttggttatcgcaaggaagatctgcgttaccagaagaccaaacaagtcggcctgggtgcgtggctgaaagtgaaaaagtaa

SEQ ID NO: 126 - DNA, 2331 bp, Artificial Sequence
  Synthetic
atgattctggacacggactatattacggaagatggcaagccggttatccgcattttcaagaaggaaaatggcgaattcaagatcgaatatgatcgtgaatttgaaccgtatatctacgctctgctgaaagatgacagcgcgatcgaagaagtgaaaaagattaccgctggccgccatggtcgtgtggttaaggtgaaacgcgcggaaaaagttaaaaagaaatttctgggccgtccgattgaagtgtggaaactgtatttcacccatccgcaggatgttccggccatccgtgacgaaattcgtcgccacagcgcagtcgtggatatctatgaatacgacattccgtttgcgaaacgctatctgatcgataagggcctgattccgatggaaggtgacgaagaactgaagatgatgagcttcgatatcgaaaccctgtatcacgaaggcgaagaattcggcacgggtccgatcctgatgatttcttacgcagacgaaggtgaagctcgtgtcatcacctggaagaaaattgatctgccgtatgtggaagttgtcagcacggaaaaggaaatgatcaaacgctttctgaaggtggttaaggaaaaagatccggacgtgctgattacctataacggtgataattttgacttcgcatacctgaagaaacgttgcgaaaaaatcggcattaagttcacgctgcgtcgcgacggttctgaaccgaaaatccagcgcatgggcgatcgttttgcggtcgaagtgaaaggtcgcattcatttcgatctgtatccggttatccgtcgcaccattaacctgccgacctatacgctggaagcggtttacgaagccgtctttggcaccccgaaggaaaaagtgtacccggaagaaattaccacggcctgggaaacgggcgaaggtctggaacgcgtcgcccgttatagtatggaagatgcaaaagtgacctacgaactgggtcgcgaatttttcccgatggaagcacagctgtcccgtctgatcggccaatcactgtgggatgtgtcgcgcagctctacgggtaacctggttgaatggttcctgctgcgtaaagcgtatgaacgcaacgaagtggcaccgaataaaccggatgaacgtgaatatcagcgtcgcctgcgcgaaagttatgcaggcggttacgtgaaagaaccggaaaaaggtctgtgggaaggcctggtttatctggattttcgtgcgctgtacccgagcattatcattacgcataacgtttctccggacaccctgaatcgtgaaggctgccgcgaatatgatattgcgccggaagtgggtcacaaattttgtaaagatatcccgggcttcattccgagcctgctgaaacgtctgctggaagaacgccagaaaatcaaaacgaaaatgaaagaaacccaagatccgatcgaaaaaattctgctggactaccgtcagcgcgcgatcaaaattctggccaacagttattacggttattacggctatgcaaaagctcgctggtactgcaaagaatgtgcagaatccgttaccgcttggggtcgtaaatacatcgaattcgtctggaaagaactggaagaaaaattcggtttcaaagttctgtacatcgatacggacggtctgtacgcaaccatcccgggcggtaaaccggaagaaattaagaaaaaagccctggaatttgtggattacattaatgcaaaactgccgggcctgctggaactggaatatgaaggtttctacgtgcgtggctttttcgttaccaagaaaaaatatgccgtcattgacgaagaaggtaaagtgatcacccgcggcctggaaattgttcgtcgcgattggagtgaaattgccaaagaaacccaggcacgtgtgctggaagctctgctgaaagatggcaatgttgaagaagcggtttccattgtcaaagaagtgacggaaaagctgggtaaatatgaagtcccgccggaaaaactggtgatccatgaacaaattacccgcgaactgaaggattacaaagcgacgggcccgcacgttgctatcgcgaaacgtctggcagcgcgtggcgtgaagattcgtccgggtaccgttatcagctatattgtcctgaaaggctctggtcgtatcggtgaccgcgcgattccgtttgatgaattcgacccgacgaaacatcgctacgatgcagaatattacatcgaaaaccaggttctgccggctgtcgaacgtattctgaaagcgtttggctatcgtgccgaagatctgcgctaccagaaaacccgtcaagtgggcctgggtgtttggctgcaaccgaaaggtaagaaataa

SEQ ID NO: 127 - DNA, 2328 bp, Artificial Sequence
  Synthetic
atgattctggacacggactatattacggaagatggcaagccggttatccgcattttcaagaaggaaaatggcgaattcaagatcgaatatgatcgtgaatttgaaccgtatatctacgctctgctgaaagatgacagcgcgatcgaagaagtgaaaaagattaccgctggccgccatggtcgtgtggttaaggtgaaacgcgcggaaaaagttaaaaagaaatttctgggccgtccgattgaagtgtggaaactgtatttcacccatccgcaggatgttccggccatccgtgacgaaattcgtcgccacagcgcagtcgtggatatctatgaatacgacattccgtttgcgaaacgctatctgatcgataagggcctgattccgatggaaggtgacgaagaactgaagatgatgagcttcgatatcgaaaccctgtatcacgaaggcgaagaattcggcacgggtccgatcctgatgatttcttacgcagacgaaggtgaagctcgtgtcatcacctggaagaaaattgatctgccgtatgtggaagttgtcagcacggaaaaggaaatgatcaaacgctttctgaaggtggttaaggaaaaagatccggacgtgctgattacctataacggtgataattttgacttcgcatacctgaagaaacgttgcgaaaaaatcggcattaagttcacgctgcgtcgcgacggttctgaaccgaaaatccagcgcatgggcgatcgttttgcggtcgaagtgaaaggtcgcattcatttcgatctgtatccggttatccgtcgcaccattaacctgccgacctatacgctggaagcggtttacgaagccgtctttggcaccccgaaggaaaaagtgtacccggaagaaattaccacggcctgggaaacgggcgaaggtctggaacgcgtcgcccgttatagtatggaagatgcaaaagtgacctacgaactgggtcgcgaatttttcccgatggaagcacagctgtcccgtctgatcggccaatcactgtgggatgtgtcgcgcagctctacgggtaacctggttgaatggttcctgctgcgtaaagcgtatgaacgcaacgaagtggcaccgaataaaccggatgaacgtgaatatcagcgtcgcctgcgcgaaagttatgcaggcggttacgtgaaagaaccggaaaaaggtctgtgggaaggcctggtttatctggattttcgtgcgctgtacccgagcattatcattacgcataacgtttctccggacaccctgaatcgtgaaggctgccgcgaatatgatattgcgccggaagtgggtcacaaattttgtaaagatatcccgggcttcattccgagcctgctgaaacgtctgctggaagaacgccagaaaatcaaaacgaaaatgaaagaaacccaagatccgatcgaaaaaattctgctggactaccgtcagcgcgcgatcaaaattctggccaacagttattacggttattacggctatgcaaaagctcgctggtactgcaaagaatgtgcagaatccgttaccgcttggggtcgtaaatacatcgaattcgtctggaaagaactggaagaaaaattcggtttcaaagttctgtacatcgatacggacggtctgtacgcaaccatcccgggcggtaaaccggaagaaattaagaaaaaagccctggaatttgtggattacattaatgcaaaactgccgggcctgctggaactggaatatgaaggtttctacgtgcgtggctttttcgttaccaagaaaaaatatgccgtcattgacgaagaaggtaaagtgatcacccgcggcctggaaattgttcgtcgcgattggagtgaaattgccaaagaaacccaggcaaaggttctggaagcaattctgaaacatggtaacgtcgaagaagcggtcaagatcgtgaaagaagttaccgaaaaactgtcgaattatgaaattccggtcgaaaagctggtgatctacgaacaaattacgcgcccgctgaacgaatataaagccattggcccgcacgtggcagttgctaaacgtctggcggccaagggtatcaagattaaaccgggcatggtgattggttatgttgtcctgcgcggcgatggtccgatcagcaaacgtgcgatcgccatcgaagaattcgatggcaaaaagcataagtacgacgcagaatactacatcgaaaatcaggttctgccggccgtcgaacgtatcctgaaagcattcggttataagcgtgaagatctgcgctggcagaagaccaaacaagtgggcctgggtgcgtggctgaaagttaaaaagtcttaa

SEQ ID NO: 128 - DNA, 2331 bp, Artificial Sequence
  Synthetic
atgattctggacacggactatattacggaagatggcaagccggttatccgcattttcaagaaggaaaatggcgaattcaagatcgaatatgatcgtgaatttgaaccgtatatctacgctctgctgaaagatgacagcgcgatcgaagaagtgaaaaagattaccgctggccgccatggtcgtgtggttaaggtgaaacgcgcggaaaaagttaaaaagaaatttctgggccgtccgattgaagtgtggaaactgtatttcacccatccgcaggatgttccggccatccgtgacgaaattcgtcgccacagcgcagtcgtggatatctatgaatacgacattccgtttgcgaaacgctatctgatcgataagggcctgattccgatggaaggtgacgaagaactgaagatgatgagcttcgatatcgaaaccctgtatcacgaaggcgaagaattcggcacgggtccgatcctgatgatttcttacgcagacgaaggtgaagctcgtgtcatcacctggaagaaaattgatctgccgtatgtggaagttgtcagcacggaaaaggaaatgatcaaacgctttctgaaggtggttaaggaaaaagatccggacgtgctgattacctataacggtgataattttgacttcgcatacctgaagaaacgttgcgaaaaaatcggcattaagttcacgctgcgtcgcgacggttctgaaccgaaaatccagcgcatgggcgatcgttttgcggtcgaagtgaaaggtcgcattcatttcgatctgtatccggttatccgtcgcaccattaacctgccgacctatacgctggaagcggtttacgaagccgtctttggcaccccgaaggaaaaagtgtacccggaagaaattaccacggcctgggaaacgggcgaaggtctggaacgcgtcgcccgttatagtatggaagatgcaaaagtgacctacgaactgggtcgcgaatttttcccgatggaagcacagctgtcccgtctgatcggccaatcactgtgggatgtgtcgcgcagctctacgggtaacctggttgaatggttcctgctgcgtaaagcgtatgaacgcaacgaagtggcaccgaataaaccggatgaacgtgaatatcagcgtcgcctgcgcgaaagttatgcaggcggttacgtgaaagaaccggaaaaaggtctgtgggaaggcctggtttatctggattttcgtgcgctgtacccgagcattatcattacgcataacgtttctccggacaccctgaatcgtgaaggctgccgcgaatatgatattgcgccggaagtgggtcacaaattttgtaaagatatcccgggcttcattccgagcctgctgaaacgtctgctggaagaacgccagaaaatcaaaacgaaaatgaaagaaacccaagatccgatcgaaaaaattctgctggactaccgtcagcgcgcgatcaaaattctggccaacagttattacggttattacggctatgcaaaagctcgctggtactgcaaagaatgtgcagaatccgttaccgcttggggtcgtaaatacatcgaattcgtctggaaagaactggaagaaaaattcggtttcaaagttctgtacatcgatacggacggtctgtacgcaaccatcccgggcggtaaaccggaagaaattaagaaaaaagccctggaatttgtggattacattaatgcaaaactgccgggcctgctggaactggaatatgaaggtttctacgtgcgtggctttttcgttaccaagaaaaaatatgccgtcattgacgaagaaggtaaagtgatcacccgcggcctggaaattgttcgtcgcgattggagtgaaattgccaaagaaacccaggcacgtgttctggaagcactgctgaaagatggtaatgtcgaagaagcagtgagtattgttaaagaagtcacggaaaaactgtccaagtatgaagtcccgccggaaaaactggtgattcatgaacaaatcacccgcgaactgaaagattacaaggcgacgggcccgcacgtggcaattgctaaacgtctggcagcgcgtggcgttaagatccgtccgggtaccgttattagctatatcgtcctgaaaggctctggtcgtattggtgaccgcgccatcccgtttgatgaattcgacccggctaaacaccgctacgatgcggaatattacattgaaaatcaggtcctgccggctgtggaacgtatcctgaaagcgtttggctatcgtaaggaagatctgcgctaccagaaaacccgtcaagtgggcctgggtgcgtggctgaaaccgaagggtaaaaagtaa

SEQ ID NO: 129 - DNA, 2331 bp, Artificial Sequence
  Synthetic
atgattctggacacggactatattacggaagatggcaagccggttatccgcattttcaagaaggaaaatggcgaattcaagatcgaatatgatcgtgaatttgaaccgtatatctacgctctgctgaaagatgacagcgcgatcgaagaagtgaaaaagattaccgctggccgccatggtcgtgtggttaaggtgaaacgcgcggaaaaagttaaaaagaaatttctgggccgtccgattgaagtgtggaaactgtatttcacccatccgcaggatgttccggccatccgtgacgaaattcgtcgccacagcgcagtcgtggatatctatgaatacgacattccgtttgcgaaacgctatctgatcgataagggcctgattccgatggaaggtgacgaagaactgaagatgatgagcttcgatatcgaaaccctgtatcacgaaggcgaagaattcggcacgggtccgatcctgatgatttcttacgcagacgaaggtgaagctcgtgtcatcacctggaagaaaattgatctgccgtatgtggaagttgtcagcacggaaaaggaaatgatcaaacgctttctgaaggtggttaaggaaaaagatccggacgtgctgattacctataacggtgataattttgacttcgcatacctgaagaaacgttgcgaaaaaatcggcattaagttcacgctgcgtcgcgacggttctgaaccgaaaatccagcgcatgggcgatcgttttgcggtcgaagtgaaaggtcgcattcatttcgatctgtatccggttatccgtcgcaccattaacctgccgacctatacgctggaagcggtttacgaagccgtctttggcaccccgaaggaaaaagtgtacccggaagaaattaccacggcctgggaaacgggcgaaggtctggaacgcgtcgcccgttatagtatggaagatgcaaaagtgacctacgaactgggtcgcgaatttttcccgatggaagcacagctgtcccgtctgatcggccaatcactgtgggatgtgtcgcgcagctctacgggtaacctggttgaatggttcctgctgcgtaaagcgtatgaacgcaacgaagtggcaccgaataaaccggatgaacgtgaatatcagcgtcgcctgcgcgaaagttatgcaggcggttacgtgaaagaaccggaaaaaggtctgtgggaaggcctggtttatctggattttcgtgcgctgtacccgagcattatcattacgcataacgtttctccggacaccctgaatcgtgaaggctgccgcgaatatgatattgcgccggaagtgggtcacaaattttgtaaagatatcccgggcttcattccgagcctgctgaaacgtctgctggaagaacgccagaaaatcaaaacgaaaatgaaagaaacccaagatccgatcgaaaaaattctgctggactaccgtcagcgcgcgatcaaaattctggccaacagttattacggttattacggctatgcaaaagctcgctggtactgcaaagaatgtgcagaatccgttaccgcttggggtcgtaaatacatcgaattcgtctggaaagaactggaagaaaaattcggtttcaaagttctgtacatcgatacggacggtctgtacgcaaccatcccgggcggtaaaccggaagaaattaagaaaaaagccctggaatttgtggattacattaatgcaaaactgccgggcctgctggaactggaatatgaaggtttctacgtgcgtggctttttcgttaccaagaaaaaatatgccgtcattgacgaagaaggtaaagtgatcacccgcggcctggaaattgttcgtcgcgattggagtgaaattgccaaagaaacccaggcacgcgtcctggaagcaatcctgaaagatggtgacgtggaagaagccgtccgtattgtgaaagaagttacggaaaaactgtccaaatatgaagttccgccggaaaaactggtcatccatgaacaaattacccgcgaactgaaagattacaaagcgacgggcccgcacgtcgcaatcgctaaacgtctggcggcgcgtggcgtgaaaattcgtccgggtaccgtgatctcatatattgttctgaaaggctcgggtcgtatcggtgaccgcgctattccgtttgatgaattcgacccgaaaaaacacaaatacgatgcggaatactacatcgaaaaccaggttctgccggccgtcgaacgtattctgcgcgcatttggctaccgtaaagaagatctgcgttatcaaaaaaccaaacaagtgggtctgggtgcgtggctgaaaccgaaaggtaaaaaataa

SEQ ID NO: 130 - DNA, 2328 bp, Artificial Sequence
  Synthetic
atgattctggacacggactatattacggaagatggcaagccggttatccgcattttcaagaaggaaaatggcgaattcaagatcgaatatgatcgtgaatttgaaccgtatatctacgctctgctgaaagatgacagcgcgatcgaagaagtgaaaaagattaccgctggccgccatggtcgtgtggttaaggtgaaacgcgcggaaaaagttaaaaagaaatttctgggccgtccgattgaagtgtggaaactgtatttcacccatccgcaggatgttccggccatccgtgacgaaattcgtcgccacagcgcagtcgtggatatctatgaatacgacattccgtttgcgaaacgctatctgatcgataagggcctgattccgatggaaggtgacgaagaactgaagatgatgagcttcgatatcgaaaccctgtatcacgaaggcgaagaattcggcacgggtccgatcctgatgatttcttacgcagacgaaggtgaagctcgtgtcatcacctggaagaaaattgatctgccgtatgtggaagttgtcagcacggaaaaggaaatgatcaaacgctttctgaaggtggttaaggaaaaagatccggacgtgctgattacctataacggtgataattttgacttcgcatacctgaagaaacgttgcgaaaaaatcggcattaagttcacgctgcgtcgcgacggttctgaaccgaaaatccagcgcatgggcgatcgttttgcggtcgaagtgaaaggtcgcattcatttcgatctgtatccggttatccgtcgcaccattaacctgccgacctatacgctggaagcggtttacgaagccgtctttggcaccccgaaggaaaaagtgtacccggaagaaattaccacggcctgggaaacgggcgaaggtctggaacgcgtcgcccgttatagtatggaagatgcaaaagtgacctacgaactgggtcgcgaatttttcccgatggaagcacagctgtcccgtctgatcggccaatcactgtgggatgtgtcgcgcagctctacgggtaacctggttgaatggttcctgctgcgtaaagcgtatgaacgcaacgaagtggcaccgaataaaccggatgaacgtgaatatcagcgtcgcctgcgcgaaagttatgcaggcggttacgtgaaagaaccggaaaaaggtctgtgggaaggcctggtttatctggattttcgtgcgctgtacccgagcattatcattacgcataacgtttctccggacaccctgaatcgtgaaggctgccgcgaatatgatattgcgccggaagtgggtcacaaattttgtaaagatatcccgggcttcattccgagcctgctgaaacgtctgctggaagaacgccagaaaatcaaaacgaaaatgaaagaaacccaagatccgatcgaaaaaattctgctggactaccgtcagcgcgcgatcaaaattctggccaacagttattacggttattacggctatgcaaaagctcgctggtactgcaaagaatgtgcagaatccgttaccgcttggggtcgtaaatacatcgaattcgtctggaaagaactggaagaaaaattcggtttcaaagttctgtacatcgatacggacggtctgtacgcaaccatcccgggcggtaaaccggaagaaattaagaaaaaagccctggaatttgtggattacattaatgcaaaactgccgggcctgctggaactggaatatgaaggtttctacgtgcgtggctttttcgttaccaagaaaaaatatgccgtcattgacgaagaaggtaaagtgatcacccgcggcctggaaattgttcgtcgcgattggagtgaaattgccaaagaaacccaggcacgtgttctggaagcaattctgaaacatggtaacgtcgaagaagcggtcaaaatcgtgaaagaagttacggaaaaactgtctaactacgaaattccgccggaaaaactggccatctacgaacaaattacccgcccgctgcatgaatataaagcaatcggtccgcacgtcgcagtggcaaaacgtctggcagcacgcggcgttaaagtcaaaccgggtatggtcatcggctatattgtgctgcgtggtgatggcccgatcagcaaccgcgcaattctggctgaagaatacgatctgaaaaaacacaaatacgacgccgaatattacatcgaaaatcaggttctgccggctgtcctgcgtattctggaagcgtttggctatcgtaaagaagatctgcgctggcagaaaacccgtcaaacgggtctgacctcatggctgaatattaaaaaatcgtaa

SEQ ID NO: 131 - DNA, 2328 bp, Artificial Sequence
  Synthetic
atgattctggacacggactatattacggaagatggcaagccggttatccgcattttcaagaaggaaaatggcgaattcaagatcgaatatgatcgtgaatttgaaccgtatatctacgctctgctgaaagatgacagcgcgatcgaagaagtgaaaaagattaccgctggccgccatggtcgtgtggttaaggtgaaacgcgcggaaaaagttaaaaagaaatttctgggccgtccgattgaagtgtggaaactgtatttcacccatccgcaggatgttccggccatccgtgacgaaattcgtcgccacagcgcagtcgtggatatctatgaatacgacattccgtttgcgaaacgctatctgatcgataagggcctgattccgatggaaggtgacgaagaactgaagatgatgagcttcgatatcgaaaccctgtatcacgaaggcgaagaattcggcacgggtccgatcctgatgatttcttacgcagacgaaggtgaagctcgtgtcatcacctggaagaaaattgatctgccgtatgtggaagttgtcagcacggaaaaggaaatgatcaaacgctttctgaaggtggttaaggaaaaagatccggacgtgctgattacctataacggtgataattttgacttcgcatacctgaagaaacgttgcgaaaaaatcggcattaagttcacgctgcgtcgcgacggttctgaaccgaaaatccagcgcatgggcgatcgttttgcggtcgaagtgaaaggtcgcattcatttcgatctgtatccggttatccgtcgcaccattaacctgccgacctatacgctggaagcggtttacgaagccgtctttggcaccccgaaggaaaaagtgtacccggaagaaattaccacggcctgggaaacgggcgaaggtctggaacgcgtcgcccgttatagtatggaagatgcaaaagtgacctacgaactgggtcgcgaatttttcccgatggaagcacagctgtcccgtctgatcggccaatcactgtgggatgtgtcgcgcagctctacgggtaacctggttgaatggttcctgctgcgtaaagcgtatgaacgcaacgaagtggcaccgaataaaccggatgaacgtgaatatcagcgtcgcctgcgcgaaagttatgcaggcggttacgtgaaagaaccggaaaaaggtctgtgggaaggcctggtttatctggattttcgtgcgctgtacccgagcattatcattacgcataacgtttctccggacaccctgaatcgtgaaggctgccgcgaatatgatattgcgccggaagtgggtcacaaattttgtaaagatatcccgggcttcattccgagcctgctgaaacgtctgctggaagaacgccagaaaatcaaaacgaaaatgaaagaaacccaagatccgatcgaaaaaattctgctggactaccgtcagcgcgcgatcaaaattctggccaacagttattacggttattacggctatgcaaaagctcgctggtactgcaaagaatgtgcagaatccgttaccgcttggggtcgtaaatacatcgaattcgtctggaaagaactggaagaaaaattcggtttcaaagttctgtacatcgatacggacggtctgtacgcaaccatcccgggcggtaaaccggaagaaattaagaaaaaagccctggaatttgtggattacattaatgcaaaactgccgggcctgctggaactggaatatgaaggtttctacgtgcgtggctttttcgttaccaagaaaaaatatgccgtcattgacgaagaaggtaaagtgatcacccgcggcctggaaattgttcgtcgcgattggagtgaaattgccaaagaaacccaggcaaaagttctggaagcaatcctgaaacatggtaatgtcgaagaagcagtgaaaattgtcaaggaagtgacggaaaaactgtcgaagtatgaaatcccgccggaaaaactggtgatctacgaacaaattacccgcccgctgcatgaatataaagcgattggcccgcacgtggcagttgctaaacgtctggcagcccgcggtgtcaaagtgcgtccgggcatggtgatcggttatattgttctgcgtggcgatggtccgatcagtaaacgcgcgattctggccgaagaatttgatccgcgcaaacacaagtacgacgccgaatattacatcgaaaaccaggtgctgccggctgttctgcgtattctggaagcgttcggctatcgtaaagaagatctgcgctggcagaaaaccaagcaaacgggtctgaccgcatggctgaatgtgaaaaagaaataa

SEQ ID NO: 132 - DNA, 2328 bp, Artificial Sequence
  Synthetic
atgattctggacacggactatattacggaagatggcaagccggttatccgcattttcaagaaggaaaatggcgaattcaagatcgaatatgatcgtgaatttgaaccgtatatctacgctctgctgaaagatgacagcgcgatcgaagaagtgaaaaagattaccgctggccgccatggtcgtgtggttaaggtgaaacgcgcggaaaaagttaaaaagaaatttctgggccgtccgattgaagtgtggaaactgtatttcacccatccgcaggatgttccggccatccgtgacgaaattcgtcgccacagcgcagtcgtggatatctatgaatacgacattccgtttgcgaaacgctatctgatcgataagggcctgattccgatggaaggtgacgaagaactgaagatgatgagcttcgatatcgaaaccctgtatcacgaaggcgaagaattcggcacgggtccgatcctgatgatttcttacgcagacgaaggtgaagctcgtgtcatcacctggaagaaaattgatctgccgtatgtggaagttgtcagcacggaaaaggaaatgatcaaacgctttctgaaggtggttaaggaaaaagatccggacgtgctgattacctataacggtgataattttgacttcgcatacctgaagaaacgttgcgaaaaaatcggcattaagttcacgctgcgtcgcgacggttctgaaccgaaaatccagcgcatgggcgatcgttttgcggtcgaagtgaaaggtcgcattcatttcgatctgtatccggttatccgtcgcaccattaacctgccgacctatacgctggaagcggtttacgaagccgtctttggcaccccgaaggaaaaagtgtacccggaagaaattaccacggcctgggaaacgggcgaaggtctggaacgcgtcgcccgttatagtatggaagatgcaaaagtgacctacgaactgggtcgcgaatttttcccgatggaagcacagctgtcccgtctgatcggccaatcactgtgggatgtgtcgcgcagctctacgggtaacctggttgaatggttcctgctgcgtaaagcgtatgaacgcaacgaactggcgccgaataaaccggatgaaaaggaactggcacgtcgccgtggcggttatgcaggcggttacgtcaaagaaccggaacgtggcctgtgggataatattgtgtatctggactttcgcagtctgtacccgtccattatcattacccataacgttagtccggacacgctgaatcgcgaaggctgcaaagaatatgatgtggccccggaagttggtcacaagttctgtaaagactttccgggcttcatcccgtccctgctgggtgatctgctggaagaacgccagaagattaagcgtaagatgaaagcaaccgttgatccgctggaaaagaaactgctggactatcgccaacgtgcgatcaaaattctggccaacagctattacggctattacggttatgcgaaagcccgctggtactgccgtgaatgtgcagaatctgtgaccgcttggggccgcgaatatattgaaaccacgatccgtgaaatcgaagaaaagttcggtttcaaggttctgtacgctgataccgacggctttttcgcgacgatcccgggtgcagatgctgaaaccgtgaaaaagaaagctaaggaattcctgaagtacatcaacgcgaaactgccgggcctgctggaactggaatatgaaggcttctacgttcgtggctttttcgtcacgaagaaaaagtacgcggttatcgacgaagaaggcaaaattaccacgcgcggtctggaaatcgtgcgccgtgattggagtgaaattgccaaagaaacccaggcacgcgttctggaagcaatcctgcgtcatggtgacgtcgaagaagccgttcgcattgtcaaagatgtgacggaaaagctgtcgaaatatgaagtcccgccggaaaaactggtgatccatgaacaaattacccgtgaactgaaggattacaaagcgacgggcccgcacgttgcaattgctaaacgcctggcagcccgtggcatcaagattcgtccgggtaccgttatcagctatattgtcctgaaaggctctggtcgcatcggtgatcgtgctattccgtttgatgaattcgacccgacgaaacaccgttacgatgccgaatattacatcgaaaatcaggtgctgccggccgttgaacgcattctgaaagcatttggctataagaaagaagaactgcgctaccagaaaacccgtcaagtgggcctgggtgcgtggctgaagctgaaaggtaagaaataa

SEQ ID NO: 133 - DNA, 2322 bp, Artificial Sequence
  Synthetic
atgattctggacacggactatattacggaagatggcaagccggttatccgcattttcaagaaggaaaatggcgaattcaagatcgaatatgatcgtgaatttgaaccgtatatctacgctctgctgaaagatgacagcgcgatcgaagaagtgaaaaagattaccgctggccgccatggtcgtgtggttaaggtgaaacgcgcggaaaaagttaaaaagaaatttctgggccgtccgattgaagtgtggaaactgtatttcacccatccgcaggatgttccggccatccgtgacgaaattcgtcgccacagcgcagtcgtggatatctatgaatacgacattccgtttgcgaaacgctatctgatcgataagggcctgattccgatggaaggtgacgaagaactgaagatgatgagcttcgatatcgaaaccctgtatcacgaaggcgaagaattcggcacgggtccgatcctgatgatttcttacgcagacgaaggtgaagctcgtgtcatcacctggaagaaaattgatctgccgtatgtggaagttgtcagcacggaaaaggaaatgatcaaacgctttctgaaggtggttaaggaaaaagatccggacgtgctgattacctataacggtgataattttgacttcgcatacctgaagaaacgttgcgaaaaaatcggcattaagttcacgctgcgtcgcgacggttctgaaccgaaaatccagcgcatgggcgatcgttttgcggtcgaagtgaaaggtcgcattcatttcgatctgtatccggttatccgtcgcaccattaacctgccgacctatacgctggaagcggtttacgaagccgtctttggcaccccgaaggaaaaagtgtacccggaagaaattaccacggcctgggaaacgggcgaaggtctggaacgcgtcgcccgttatagtatggaagatgcaaaagtgacctacgaactgggtcgcgaatttttcccgatggaagcacagctgtcccgtctgatcggccaatcactgtgggatgtgtcgcgcagctctacgggtaacctggttgaatggttcctgctgcgtaaagcgtatgaacgcaacgaactggcgccgaataaaccggatgaaaaggaactggcacgtcgccgtggcggttatgcaggcggttacgtcaaagaaccggaacgtggcctgtgggataatattgtgtatctggactttcgcagtctgtacccgtccattatcattacccataacgttagtccggacacgctgaatcgcgaaggctgcaaagaatatgatgtggccccggaagttggtcacaagttctgtaaagactttccgggcttcatcccgtccctgctgggtgatctgctggaagaacgccagaagattaagcgtaagatgaaagcaaccgttgatccgctggaaaagaaactgctggactatcgccaacgtgcgatcaaaattctggccaacagctattacggctattacggttatgcgaaagcccgctggtactgccgtgaatgtgcagaatctgtgaccgcttggggccgcgaatatattgaaaccacgatccgtgaaatcgaagaaaagttcggtttcaaggttctgtacgctgataccgacggctttttcgcgacgatcccgggtgcagatgctgaaaccgtgaaaaagaaagctaaggaattcctgaagtacatcaacgcgaaactgccgggcctgctggaactggaatatgaaggcttctacgttcgtggctttttcgtcacgaagaaaaagtacgcggttatcgacgaagaaggcaaaattaccacgcgcggtctggaaatcgtgcgccgtgattggagtgaaattgccaaagaaacccaggcacgtgtcctggaagcaatcctgaaacatggtgatgtggaagaagcggttcgcattgtcaaagaagtgacggaaaagctgtcgaaatatgaagttccgccggaaaaactggtcatccatgaacaaattacccgcgatctgcgtgactacaaagccacgggtccgcacgtggcagttgcaaaacgtctggcagcccgtggcgtgaagattcgtccgggtaccgtgatcagttatattgttctgaaaggctccggtcgcatcggtgaccgtgctattccgtttgatgaattcgacccgacgaaacaccgttacgatgccgaatattacatcgaaaatcaggtcctgccggccgtggaacgcattctgaaagcatttggttatcgcaaggaagatctgcgttaccagaagaccaaacaagtcggcctgggtgcgtggctgaaagtgaaaaagtaa

SEQ ID NO: 134 - DNA, 2328 bp, Artificial Sequence
  Synthetic
atgattctggacacggactatattacggaagatggcaagccggttatccgcattttcaagaaggaaaatggcgaattcaagatcgaatatgatcgtgaatttgaaccgtatatctacgctctgctgaaagatgacagcgcgatcgaagaagtgaaaaagattaccgctggccgccatggtcgtgtggttaaggtgaaacgcgcggaaaaagttaaaaagaaatttctgggccgtccgattgaagtgtggaaactgtatttcacccatccgcaggatgttccggccatccgtgacgaaattcgtcgccacagcgcagtcgtggatatctatgaatacgacattccgtttgcgaaacgctatctgatcgataagggcctgattccgatggaaggtgacgaagaactgaagatgatgagcttcgatatcgaaaccctgtatcacgaaggcgaagaattcggcacgggtccgatcctgatgatttcttacgcagacgaaggtgaagctcgtgtcatcacctggaagaaaattgatctgccgtatgtggaagttgtcagcacggaaaaggaaatgatcaaacgctttctgaaggtggttaaggaaaaagatccggacgtgctgattacctataacggtgataattttgacttcgcatacctgaagaaacgttgcgaaaaaatcggcattaagttcacgctgcgtcgcgacggttctgaaccgaaaatccagcgcatgggcgatcgttttgcggtcgaagtgaaaggtcgcattcatttcgatctgtatccggttatccgtcgcaccattaacctgccgacctatacgctggaagcggtttacgaagccgtctttggcaccccgaaggaaaaagtgtacccggaagaaattaccacggcctgggaaacgggcgaaggtctggaacgcgtcgcccgttatagtatggaagatgcaaaagtgacctacgaactgggtcgcgaatttttcccgatggaagcacagctgtcccgtctgatcggccaatcactgtgggatgtgtcgcgcagctctacgggtaacctggttgaatggttcctgctgcgtaaagcgtatgaacgcaacgaactggcgccgaataaaccggatgaaaaggaactggcacgtcgccgtggcggttatgcaggcggttacgtcaaagaaccggaacgtggcctgtgggataatattgtgtatctggactttcgcagtctgtacccgtccattatcattacccataacgttagtccggacacgctgaatcgcgaaggctgcaaagaatatgatgtggccccggaagttggtcacaagttctgtaaagactttccgggcttcatcccgtccctgctgggtgatctgctggaagaacgccagaagattaagcgtaagatgaaagcaaccgttgatccgctggaaaagaaactgctggactatcgccaacgtgcgatcaaaattctggccaacagctattacggctattacggttatgcgaaagcccgctggtactgccgtgaatgtgcagaatctgtgaccgcttggggccgcgaatatattgaaaccacgatccgtgaaatcgaagaaaagttcggtttcaaggttctgtacgctgataccgacggctttttcgcgacgatcccgggtgcagatgctgaaaccgtgaaaaagaaagctaaggaattcctgaagtacatcaacgcgaaactgccgggcctgctggaactggaatatgaaggcttctacgttcgtggctttttcgtcacgaagaaaaagtacgcggttatcgacgaagaaggcaaaattaccacgcgcggtctggaaatcgtgcgccgtgattggagtgaaattgccaaagaaacccaggcacgtgtgctggaagctctgctgaaagatggcaatgttgaagaagcggtttccattgtcaaagaagtgacggaaaagctgggtaaatatgaagtcccgccggaaaaactggtgatccatgaacaaattacccgcgaactgaaggattacaaagcgacgggcccgcacgttgctatcgcgaaacgtctggcagcgcgtggcgtgaagattcgtccgggtaccgttatcagctatattgtcctgaaaggctctggtcgtatcggtgaccgcgcgattccgtttgatgaattcgacccgacgaaacatcgctacgatgcagaatattacatcgaaaaccaggttctgccggctgtcgaacgtattctgaaagcgtttggctatcgtgccgaagatctgcgctaccagaaaacccgtcaagtgggcctgggtgtttggctgcaaccgaaaggtaagaaataa

SEQ ID NO: 135 - DNA, 2325 bp, Artificial Sequence
  Synthetic
atgattctggacacggactatattacggaagatggcaagccggttatccgcattttcaagaaggaaaatggcgaattcaagatcgaatatgatcgtgaatttgaaccgtatatctacgctctgctgaaagatgacagcgcgatcgaagaagtgaaaaagattaccgctggccgccatggtcgtgtggttaaggtgaaacgcgcggaaaaagttaaaaagaaatttctgggccgtccgattgaagtgtggaaactgtatttcacccatccgcaggatgttccggccatccgtgacgaaattcgtcgccacagcgcagtcgtggatatctatgaatacgacattccgtttgcgaaacgctatctgatcgataagggcctgattccgatggaaggtgacgaagaactgaagatgatgagcttcgatatcgaaaccctgtatcacgaaggcgaagaattcggcacgggtccgatcctgatgatttcttacgcagacgaaggtgaagctcgtgtcatcacctggaagaaaattgatctgccgtatgtggaagttgtcagcacggaaaaggaaatgatcaaacgctttctgaaggtggttaaggaaaaagatccggacgtgctgattacctataacggtgataattttgacttcgcatacctgaagaaacgttgcgaaaaaatcggcattaagttcacgctgcgtcgcgacggttctgaaccgaaaatccagcgcatgggcgatcgttttgcggtcgaagtgaaaggtcgcattcatttcgatctgtatccggttatccgtcgcaccattaacctgccgacctatacgctggaagcggtttacgaagccgtctttggcaccccgaaggaaaaagtgtacccggaagaaattaccacggcctgggaaacgggcgaaggtctggaacgcgtcgcccgttatagtatggaagatgcaaaagtgacctacgaactgggtcgcgaatttttcccgatggaagcacagctgtcccgtctgatcggccaatcactgtgggatgtgtcgcgcagctctacgggtaacctggttgaatggttcctgctgcgtaaagcgtatgaacgcaacgaactggcgccgaataaaccggatgaaaaggaactggcacgtcgccgtggcggttatgcaggcggttacgtcaaagaaccggaacgtggcctgtgggataatattgtgtatctggactttcgcagtctgtacccgtccattatcattacccataacgttagtccggacacgctgaatcgcgaaggctgcaaagaatatgatgtggccccggaagttggtcacaagttctgtaaagactttccgggcttcatcccgtccctgctgggtgatctgctggaagaacgccagaagattaagcgtaagatgaaagcaaccgttgatccgctggaaaagaaactgctggactatcgccaacgtgcgatcaaaattctggccaacagctattacggctattacggttatgcgaaagcccgctggtactgccgtgaatgtgcagaatctgtgaccgcttggggccgcgaatatattgaaaccacgatccgtgaaatcgaagaaaagttcggtttcaaggttctgtacgctgataccgacggctttttcgcgacgatcccgggtgcagatgctgaaaccgtgaaaaagaaagctaaggaattcctgaagtacatcaacgcgaaactgccgggcctgctggaactggaatatgaaggcttctacgttcgtggctttttcgtcacgaagaaaaagtacgcggttatcgacgaagaaggcaaaattaccacgcgcggtctggaaatcgtgcgccgtgattggagtgaaattgccaaagaaacccaggcaaaggttctggaagcaattctgaaacatggtaacgtcgaagaagcggtcaagatcgtgaaagaagttaccgaaaaactgtcgaattatgaaattccggtcgaaaagctggtgatctacgaacaaattacgcgcccgctgaacgaatataaagccattggcccgcacgtggcagttgctaaacgtctggcggccaagggtatcaagattaaaccgggcatggtgattggttatgttgtcctgcgcggcgatggtccgatcagcaaacgtgcgatcgccatcgaagaattcgatggcaaaaagcataagtacgacgcagaatactacatcgaaaatcaggttctgccggccgtcgaacgtatcctgaaagcattcggttataagcgtgaagatctgcgctggcagaagaccaaacaagtgggcctgggtgcgtggctgaaagttaaaaagtcttaa

SEQ ID NO: 136 - DNA, 2328 bp, Artificial Sequence
  Synthetic
atgattctggacacggactatattacggaagatggcaagccggttatccgcattttcaagaaggaaaatggcgaattcaagatcgaatatgatcgtgaatttgaaccgtatatctacgctctgctgaaagatgacagcgcgatcgaagaagtgaaaaagattaccgctggccgccatggtcgtgtggttaaggtgaaacgcgcggaaaaagttaaaaagaaatttctgggccgtccgattgaagtgtggaaactgtatttcacccatccgcaggatgttccggccatccgtgacgaaattcgtcgccacagcgcagtcgtggatatctatgaatacgacattccgtttgcgaaacgctatctgatcgataagggcctgattccgatggaaggtgacgaagaactgaagatgatgagcttcgatatcgaaaccctgtatcacgaaggcgaagaattcggcacgggtccgatcctgatgatttcttacgcagacgaaggtgaagctcgtgtcatcacctggaagaaaattgatctgccgtatgtggaagttgtcagcacggaaaaggaaatgatcaaacgctttctgaaggtggttaaggaaaaagatccggacgtgctgattacctataacggtgataattttgacttcgcatacctgaagaaacgttgcgaaaaaatcggcattaagttcacgctgcgtcgcgacggttctgaaccgaaaatccagcgcatgggcgatcgttttgcggtcgaagtgaaaggtcgcattcatttcgatctgtatccggttatccgtcgcaccattaacctgccgacctatacgctggaagcggtttacgaagccgtctttggcaccccgaaggaaaaagtgtacccggaagaaattaccacggcctgggaaacgggcgaaggtctggaacgcgtcgcccgttatagtatggaagatgcaaaagtgacctacgaactgggtcgcgaatttttcccgatggaagcacagctgtcccgtctgatcggccaatcactgtgggatgtgtcgcgcagctctacgggtaacctggttgaatggttcctgctgcgtaaagcgtatgaacgcaacgaactggcgccgaataaaccggatgaaaaggaactggcacgtcgccgtggcggttatgcaggcggttacgtcaaagaaccggaacgtggcctgtgggataatattgtgtatctggactttcgcagtctgtacccgtccattatcattacccataacgttagtccggacacgctgaatcgcgaaggctgcaaagaatatgatgtggccccggaagttggtcacaagttctgtaaagactttccgggcttcatcccgtccctgctgggtgatctgctggaagaacgccagaagattaagcgtaagatgaaagcaaccgttgatccgctggaaaagaaactgctggactatcgccaacgtgcgatcaaaattctggccaacagctattacggctattacggttatgcgaaagcccgctggtactgccgtgaatgtgcagaatctgtgaccgcttggggccgcgaatatattgaaaccacgatccgtgaaatcgaagaaaagttcggtttcaaggttctgtacgctgataccgacggctttttcgcgacgatcccgggtgcagatgctgaaaccgtgaaaaagaaagctaaggaattcctgaagtacatcaacgcgaaactgccgggcctgctggaactggaatatgaaggcttctacgttcgtggctttttcgtcacgaagaaaaagtacgcggttatcgacgaagaaggcaaaattaccacgcgcggtctggaaatcgtgcgccgtgattggagtgaaattgccaaagaaacccaggcacgtgttctggaagcactgctgaaagatggtaatgtcgaagaagcagtgagtattgttaaagaagtcacggaaaaactgtccaagtatgaagtcccgccggaaaaactggtgattcatgaacaaatcacccgcgaactgaaagattacaaggcgacgggcccgcacgtggcaattgctaaacgtctggcagcgcgtggcgttaagatccgtccgggtaccgttattagctatatcgtcctgaaaggctctggtcgtattggtgaccgcgccatcccgtttgatgaattcgacccggctaaacaccgctacgatgcggaatattacattgaaaatcaggtcctgccggctgtggaacgtatcctgaaagcgtttggctatcgtaaggaagatctgcgctaccagaaaacccgtcaagtgggcctgggtgcgtggctgaaaccgaagggtaaaaagtaa

SEQ ID NO: 137 - DNA, 2328 bp, Artificial Sequence
  Synthetic
atgattctggacacggactatattacggaagatggcaagccggttatccgcattttcaagaaggaaaatggcgaattcaagatcgaatatgatcgtgaatttgaaccgtatatctacgctctgctgaaagatgacagcgcgatcgaagaagtgaaaaagattaccgctggccgccatggtcgtgtggttaaggtgaaacgcgcggaaaaagttaaaaagaaatttctgggccgtccgattgaagtgtggaaactgtatttcacccatccgcaggatgttccggccatccgtgacgaaattcgtcgccacagcgcagtcgtggatatctatgaatacgacattccgtttgcgaaacgctatctgatcgataagggcctgattccgatggaaggtgacgaagaactgaagatgatgagcttcgatatcgaaaccctgtatcacgaaggcgaagaattcggcacgggtccgatcctgatgatttcttacgcagacgaaggtgaagctcgtgtcatcacctggaagaaaattgatctgccgtatgtggaagttgtcagcacggaaaaggaaatgatcaaacgctttctgaaggtggttaaggaaaaagatccggacgtgctgattacctataacggtgataattttgacttcgcatacctgaagaaacgttgcgaaaaaatcggcattaagttcacgctgcgtcgcgacggttctgaaccgaaaatccagcgcatgggcgatcgttttgcggtcgaagtgaaaggtcgcattcatttcgatctgtatccggttatccgtcgcaccattaacctgccgacctatacgctggaagcggtttacgaagccgtctttggcaccccgaaggaaaaagtgtacccggaagaaattaccacggcctgggaaacgggcgaaggtctggaacgcgtcgcccgttatagtatggaagatgcaaaagtgacctacgaactgggtcgcgaatttttcccgatggaagcacagctgtcccgtctgatcggccaatcactgtgggatgtgtcgcgcagctctacgggtaacctggttgaatggttcctgctgcgtaaagcgtatgaacgcaacgaactggcgccgaataaaccggatgaaaaggaactggcacgtcgccgtggcggttatgcaggcggttacgtcaaagaaccggaacgtggcctgtgggataatattgtgtatctggactttcgcagtctgtacccgtccattatcattacccataacgttagtccggacacgctgaatcgcgaaggctgcaaagaatatgatgtggccccggaagttggtcacaagttctgtaaagactttccgggcttcatcccgtccctgctgggtgatctgctggaagaacgccagaagattaagcgtaagatgaaagcaaccgttgatccgctggaaaagaaactgctggactatcgccaacgtgcgatcaaaattctggccaacagctattacggctattacggttatgcgaaagcccgctggtactgccgtgaatgtgcagaatctgtgaccgcttggggccgcgaatatattgaaaccacgatccgtgaaatcgaagaaaagttcggtttcaaggttctgtacgctgataccgacggctttttcgcgacgatcccgggtgcagatgctgaaaccgtgaaaaagaaagctaaggaattcctgaagtacatcaacgcgaaactgccgggcctgctggaactggaatatgaaggcttctacgttcgtggctttttcgtcacgaagaaaaagtacgcggttatcgacgaagaaggcaaaattaccacgcgcggtctggaaatcgtgcgccgtgattggagtgaaattgccaaagaaacccaggcacgcgtcctggaagcaatcctgaaagatggtgacgtggaagaagccgtccgtattgtgaaagaagttacggaaaaactgtccaaatatgaagttccgccggaaaaactggtcatccatgaacaaattacccgcgaactgaaagattacaaagcgacgggcccgcacgtcgcaatcgctaaacgtctggcggcgcgtggcgtgaaaattcgtccgggtaccgtgatctcatatattgttctgaaaggctcgggtcgtatcggtgaccgcgctattccgtttgatgaattcgacccgaaaaaacacaaatacgatgcggaatactacatcgaaaaccaggttctgccggccgtcgaacgtattctgcgcgcatttggctaccgtaaagaagatctgcgttatcaaaaaaccaaacaagtgggtctgggtgcgtggctgaaaccgaaaggtaaaaaataa

SEQ ID NO: 138 - DNA, 2325 bp, Artificial Sequence
  Synthetic
atgattctggacacggactatattacggaagatggcaagccggttatccgcattttcaagaaggaaaatggcgaattcaagatcgaatatgatcgtgaatttgaaccgtatatctacgctctgctgaaagatgacagcgcgatcgaagaagtgaaaaagattaccgctggccgccatggtcgtgtggttaaggtgaaacgcgcggaaaaagttaaaaagaaatttctgggccgtccgattgaagtgtggaaactgtatttcacccatccgcaggatgttccggccatccgtgacgaaattcgtcgccacagcgcagtcgtggatatctatgaatacgacattccgtttgcgaaacgctatctgatcgataagggcctgattccgatggaaggtgacgaagaactgaagatgatgagcttcgatatcgaaaccctgtatcacgaaggcgaagaattcggcacgggtccgatcctgatgatttcttacgcagacgaaggtgaagctcgtgtcatcacctggaagaaaattgatctgccgtatgtggaagttgtcagcacggaaaaggaaatgatcaaacgctttctgaaggtggttaaggaaaaagatccggacgtgctgattacctataacggtgataattttgacttcgcatacctgaagaaacgttgcgaaaaaatcggcattaagttcacgctgcgtcgcgacggttctgaaccgaaaatccagcgcatgggcgatcgttttgcggtcgaagtgaaaggtcgcattcatttcgatctgtatccggttatccgtcgcaccattaacctgccgacctatacgctggaagcggtttacgaagccgtctttggcaccccgaaggaaaaagtgtacccggaagaaattaccacggcctgggaaacgggcgaaggtctggaacgcgtcgcccgttatagtatggaagatgcaaaagtgacctacgaactgggtcgcgaatttttcccgatggaagcacagctgtcccgtctgatcggccaatcactgtgggatgtgtcgcgcagctctacgggtaacctggttgaatggttcctgctgcgtaaagcgtatgaacgcaacgaactggcgccgaataaaccggatgaaaaggaactggcacgtcgccgtggcggttatgcaggcggttacgtcaaagaaccggaacgtggcctgtgggataatattgtgtatctggactttcgcagtctgtacccgtccattatcattacccataacgttagtccggacacgctgaatcgcgaaggctgcaaagaatatgatgtggccccggaagttggtcacaagttctgtaaagactttccgggcttcatcccgtccctgctgggtgatctgctggaagaacgccagaagattaagcgtaagatgaaagcaaccgttgatccgctggaaaagaaactgctggactatcgccaacgtgcgatcaaaattctggccaacagctattacggctattacggttatgcgaaagcccgctggtactgccgtgaatgtgcagaatctgtgaccgcttggggccgcgaatatattgaaaccacgatccgtgaaatcgaagaaaagttcggtttcaaggttctgtacgctgataccgacggctttttcgcgacgatcccgggtgcagatgctgaaaccgtgaaaaagaaagctaaggaattcctgaagtacatcaacgcgaaactgccgggcctgctggaactggaatatgaaggcttctacgttcgtggctttttcgtcacgaagaaaaagtacgcggttatcgacgaagaaggcaaaattaccacgcgcggtctggaaatcgtgcgccgtgattggagtgaaattgccaaagaaacccaggcacgtgttctggaagcaattctgaaacatggtaacgtcgaagaagcggtcaaaatcgtgaaagaagttacggaaaaactgtctaactacgaaattccgccggaaaaactggccatctacgaacaaattacccgcccgctgcatgaatataaagcaatcggtccgcacgtcgcagtggcaaaacgtctggcagcacgcggcgttaaagtcaaaccgggtatggtcatcggctatattgtgctgcgtggtgatggcccgatcagcaaccgcgcaattctggctgaagaatacgatctgaaaaaacacaaatacgacgccgaatattacatcgaaaatcaggttctgccggctgtcctgcgtattctggaagcgtttggctatcgtaaagaagatctgcgctggcagaaaacccgtcaaacgggtctgacctcatggctgaatattaaaaaatcgtaa

SEQ ID NO: 139 - DNA, 2325 bp, Artificial Sequence
  Synthetic
atgattctggacacggactatattacggaagatggcaagccggttatccgcattttcaagaaggaaaatggcgaattcaagatcgaatatgatcgtgaatttgaaccgtatatctacgctctgctgaaagatgacagcgcgatcgaagaagtgaaaaagattaccgctggccgccatggtcgtgtggttaaggtgaaacgcgcggaaaaagttaaaaagaaatttctgggccgtccgattgaagtgtggaaactgtatttcacccatccgcaggatgttccggccatccgtgacgaaattcgtcgccacagcgcagtcgtggatatctatgaatacgacattccgtttgcgaaacgctatctgatcgataagggcctgattccgatggaaggtgacgaagaactgaagatgatgagcttcgatatcgaaaccctgtatcacgaaggcgaagaattcggcacgggtccgatcctgatgatttcttacgcagacgaaggtgaagctcgtgtcatcacctggaagaaaattgatctgccgtatgtggaagttgtcagcacggaaaaggaaatgatcaaacgctttctgaaggtggttaaggaaaaagatccggacgtgctgattacctataacggtgataattttgacttcgcatacctgaagaaacgttgcgaaaaaatcggcattaagttcacgctgcgtcgcgacggttctgaaccgaaaatccagcgcatgggcgatcgttttgcggtcgaagtgaaaggtcgcattcatttcgatctgtatccggttatccgtcgcaccattaacctgccgacctatacgctggaagcggtttacgaagccgtctttggcaccccgaaggaaaaagtgtacccggaagaaattaccacggcctgggaaacgggcgaaggtctggaacgcgtcgcccgttatagtatggaagatgcaaaagtgacctacgaactgggtcgcgaatttttcccgatggaagcacagctgtcccgtctgatcggccaatcactgtgggatgtgtcgcgcagctctacgggtaacctggttgaatggttcctgctgcgtaaagcgtatgaacgcaacgaactggcgccgaataaaccggatgaaaaggaactggcacgtcgccgtggcggttatgcaggcggttacgtcaaagaaccggaacgtggcctgtgggataatattgtgtatctggactttcgcagtctgtacccgtccattatcattacccataacgttagtccggacacgctgaatcgcgaaggctgcaaagaatatgatgtggccccggaagttggtcacaagttctgtaaagactttccgggcttcatcccgtccctgctgggtgatctgctggaagaacgccagaagattaagcgtaagatgaaagcaaccgttgatccgctggaaaagaaactgctggactatcgccaacgtgcgatcaaaattctggccaacagctattacggctattacggttatgcgaaagcccgctggtactgccgtgaatgtgcagaatctgtgaccgcttggggccgcgaatatattgaaaccacgatccgtgaaatcgaagaaaagttcggtttcaaggttctgtacgctgataccgacggctttttcgcgacgatcccgggtgcagatgctgaaaccgtgaaaaagaaagctaaggaattcctgaagtacatcaacgcgaaactgccgggcctgctggaactggaatatgaaggcttctacgttcgtggctttttcgtcacgaagaaaaagtacgcggttatcgacgaagaaggcaaaattaccacgcgcggtctggaaatcgtgcgccgtgattggagtgaaattgccaaagaaacccaggcaaaagttctggaagcaatcctgaaacatggtaatgtcgaagaagcagtgaaaattgtcaaggaagtgacggaaaaactgtcgaagtatgaaatcccgccggaaaaactggtgatctacgaacaaattacccgcccgctgcatgaatataaagcgattggcccgcacgtggcagttgctaaacgtctggcagcccgcggtgtcaaagtgcgtccgggcatggtgatcggttatattgttctgcgtggcgatggtccgatcagtaaacgcgcgattctggccgaagaatttgatccgcgcaaacacaagtacgacgccgaatattacatcgaaaaccaggtgctgccggctgttctgcgtattctggaagcgttcggctatcgtaaagaagatctgcgctggcagaaaaccaagcaaacgggtctgaccgcatggctgaatgtgaaaaagaaataa

SEQ ID NO: 140 - DNA, 2328 bp, Artificial Sequence
  Synthetic
atgattctggacacggactatattacggaagatggcaagccggttatccgcattttcaagaaggaaaatggcgaattcaagatcgaatatgatcgtgaatttgaaccgtatatctacgctctgctgaaagatgacagcgcgatcgaagaagtgaaaaagattaccgctggccgccatggtcgtgtggttaaggtgaaacgcgcggaaaaagttaaaaagaaatttctgggccgtccgattgaagtgtggaaactgtatttcacccatccgcaggatgttccggccatccgtgacgaaattcgtcgccacagcgcagtcgtggatatctatgaatacgacattccgtttgcgaaacgctatctgatcgataagggcctgattccgatggaaggtgacgaagaactgaagatgatgagcttcgatatcgaaaccctgtatcacgaaggcgaagaattcggcacgggtccgatcctgatgatttcttacgcagacgaaggtgaagctcgtgtcatcacctggaagaaaattgatctgccgtatgtggaagttgtcagcacggaaaaggaaatgatcaaacgctttctgaaggtggttaaggaaaaagatccggacgtgctgattacctataacggtgataattttgacttcgcatacctgaagaaacgttgcgaaaaaatcggcattaagttcacgctgcgtcgcgacggttctgaaccgaaaatccagcgcatgggcgatcgttttgcggtcgaagtgaaaggtcgcattcatttcgatctgtatccggttatccgtcgcaccattaacctgccgacctatacgctggaagcggtttacgaagccgtctttggcaccccgaaggaaaaagtgtacccggaagaaattaccacggcctgggaaacgggcgaaggtctggaacgcgtcgcccgttatagtatggaagatgcaaaagtgacctacgaactgggtcgcgaatttttcccgatggaagcacagctgtcccgtctgatcggccaatcactgtgggatgtgtcgcgcagctctacgggtaacctggttgaatggttcctgctgcgtaaagcgtatgaacgcaacgaaattgcgccgaataaaccggatgaacgtgaactggcacgtcgccgtggcggttatgcaggcggttacgttaaagaaccggaacgcggcctgtgggataatatcgtctatctggactttatgagtctgtacccgtccattatcattacccataacgttagtccggacacgttcaatcgtgaaggctgcaaagaatatgataccgccccgcaggttggtcacaagttttgtaaagacgtccaaggcttcattccgagtctgctgggtgccctgctggatgaacgccagaaaatcaagaaacgtatgaaggcatccattgatccgctggaaaagaaactgctggactatcgccaaaaggcgatcaaaattctggccaactcatattacggctattacggttatgcacgcgctcgttggtactgcaaagaatgtgcagaatcggtgaccgcttggggccgtgattatattgaaaccacgatccacgaaattgaagaacgctttggtttcaaagttctgtacgctgataccgacggctttttcgcgacgatcccgggtgcggatgccgaaaccgtgaagaaaaaggctaaggaattcctgaagtacatcaacgcgaaactgccgggcctgctggaactggaatatgaaggcttctacgtccgtggctttttcgtgaccaaaaagaaatacgcggttatcgacgaagaaggcaaaattaccacgcgcggtctggaaatcgtgcgccgtgattggagtgaaattgccaaagaaacccaggcacgcgttctggaagcaatcctgcgtcatggtgacgtcgaagaagccgttcgcattgtcaaagatgtgacggaaaagctgtcgaaatatgaagtcccgccggaaaaactggtgatccatgaacaaattacccgtgaactgaaggattacaaagcgacgggcccgcacgttgcaattgctaaacgcctggcagcccgtggcatcaagattcgtccgggtaccgttatcagctatattgtcctgaaaggctctggtcgcatcggtgatcgtgctattccgtttgatgaattcgacccgacgaaacaccgttacgatgccgaatattacatcgaaaatcaggtgctgccggccgttgaacgcattctgaaagcatttggctataagaaagaagaactgcgctaccagaaaacccgtcaagtgggcctgggtgcgtggctgaagctgaaaggtaagaaataa

SEQ ID NO: 141 - DNA, 2322 bp, Artificial Sequence
  Synthetic
atgattctggacacggactatattacggaagatggcaagccggttatccgcattttcaagaaggaaaatggcgaattcaagatcgaatatgatcgtgaatttgaaccgtatatctacgctctgctgaaagatgacagcgcgatcgaagaagtgaaaaagattaccgctggccgccatggtcgtgtggttaaggtgaaacgcgcggaaaaagttaaaaagaaatttctgggccgtccgattgaagtgtggaaactgtatttcacccatccgcaggatgttccggccatccgtgacgaaattcgtcgccacagcgcagtcgtggatatctatgaatacgacattccgtttgcgaaacgctatctgatcgataagggcctgattccgatggaaggtgacgaagaactgaagatgatgagcttcgatatcgaaaccctgtatcacgaaggcgaagaattcggcacgggtccgatcctgatgatttcttacgcagacgaaggtgaagctcgtgtcatcacctggaagaaaattgatctgccgtatgtggaagttgtcagcacggaaaaggaaatgatcaaacgctttctgaaggtggttaaggaaaaagatccggacgtgctgattacctataacggtgataattttgacttcgcatacctgaagaaacgttgcgaaaaaatcggcattaagttcacgctgcgtcgcgacggttctgaaccgaaaatccagcgcatgggcgatcgttttgcggtcgaagtgaaaggtcgcattcatttcgatctgtatccggttatccgtcgcaccattaacctgccgacctatacgctggaagcggtttacgaagccgtctttggcaccccgaaggaaaaagtgtacccggaagaaattaccacggcctgggaaacgggcgaaggtctggaacgcgtcgcccgttatagtatggaagatgcaaaagtgacctacgaactgggtcgcgaatttttcccgatggaagcacagctgtcccgtctgatcggccaatcactgtgggatgtgtcgcgcagctctacgggtaacctggttgaatggttcctgctgcgtaaagcgtatgaacgcaacgaaattgcgccgaataaaccggatgaacgtgaactggcacgtcgccgtggcggttatgcaggcggttacgttaaagaaccggaacgcggcctgtgggataatatcgtctatctggactttatgagtctgtacccgtccattatcattacccataacgttagtccggacacgttcaatcgtgaaggctgcaaagaatatgataccgccccgcaggttggtcacaagttttgtaaagacgtccaaggcttcattccgagtctgctgggtgccctgctggatgaacgccagaaaatcaagaaacgtatgaaggcatccattgatccgctggaaaagaaactgctggactatcgccaaaaggcgatcaaaattctggccaactcatattacggctattacggttatgcacgcgctcgttggtactgcaaagaatgtgcagaatcggtgaccgcttggggccgtgattatattgaaaccacgatccacgaaattgaagaacgctttggtttcaaagttctgtacgctgataccgacggctttttcgcgacgatcccgggtgcggatgccgaaaccgtgaagaaaaaggctaaggaattcctgaagtacatcaacgcgaaactgccgggcctgctggaactggaatatgaaggcttctacgtccgtggctttttcgtgaccaaaaagaaatacgcggttatcgacgaagaaggcaaaattaccacgcgcggtctggaaatcgtgcgccgtgattggagtgaaattgccaaagaaacccaggcacgtgtcctggaagcaatcctgaaacatggtgatgtggaagaagcggttcgcattgtcaaagaagtgacggaaaagctgtcgaaatatgaagttccgccggaaaaactggtcatccatgaacaaattacccgcgatctgcgtgactacaaagccacgggtccgcacgtggcagttgcaaaacgtctggcagcccgtggcgtgaagattcgtccgggtaccgtgatcagttatattgttctgaaaggctccggtcgcatcggtgaccgtgctattccgtttgatgaattcgacccgacgaaacaccgttacgatgccgaatattacatcgaaaatcaggtcctgccggccgtggaacgcattctgaaagcatttggttatcgcaaggaagatctgcgttaccagaagaccaaacaagtcggcctgggtgcgtggctgaaagtgaaaaagtaa

SEQ ID NO: 142 - DNA, 2328 bp, Artificial Sequence
  Synthetic
atgattctggacacggactatattacggaagatggcaagccggttatccgcattttcaagaaggaaaatggcgaattcaagatcgaatatgatcgtgaatttgaaccgtatatctacgctctgctgaaagatgacagcgcgatcgaagaagtgaaaaagattaccgctggccgccatggtcgtgtggttaaggtgaaacgcgcggaaaaagttaaaaagaaatttctgggccgtccgattgaagtgtggaaactgtatttcacccatccgcaggatgttccggccatccgtgacgaaattcgtcgccacagcgcagtcgtggatatctatgaatacgacattccgtttgcgaaacgctatctgatcgataagggcctgattccgatggaaggtgacgaagaactgaagatgatgagcttcgatatcgaaaccctgtatcacgaaggcgaagaattcggcacgggtccgatcctgatgatttcttacgcagacgaaggtgaagctcgtgtcatcacctggaagaaaattgatctgccgtatgtggaagttgtcagcacggaaaaggaaatgatcaaacgctttctgaaggtggttaaggaaaaagatccggacgtgctgattacctataacggtgataattttgacttcgcatacctgaagaaacgttgcgaaaaaatcggcattaagttcacgctgcgtcgcgacggttctgaaccgaaaatccagcgcatgggcgatcgttttgcggtcgaagtgaaaggtcgcattcatttcgatctgtatccggttatccgtcgcaccattaacctgccgacctatacgctggaagcggtttacgaagccgtctttggcaccccgaaggaaaaagtgtacccggaagaaattaccacggcctgggaaacgggcgaaggtctggaacgcgtcgcccgttatagtatggaagatgcaaaagtgacctacgaactgggtcgcgaatttttcccgatggaagcacagctgtcccgtctgatcggccaatcactgtgggatgtgtcgcgcagctctacgggtaacctggttgaatggttcctgctgcgtaaagcgtatgaacgcaacgaaattgcgccgaataaaccggatgaacgtgaactggcacgtcgccgtggcggttatgcaggcggttacgttaaagaaccggaacgcggcctgtgggataatatcgtctatctggactttatgagtctgtacccgtccattatcattacccataacgttagtccggacacgttcaatcgtgaaggctgcaaagaatatgataccgccccgcaggttggtcacaagttttgtaaagacgtccaaggcttcattccgagtctgctgggtgccctgctggatgaacgccagaaaatcaagaaacgtatgaaggcatccattgatccgctggaaaagaaactgctggactatcgccaaaaggcgatcaaaattctggccaactcatattacggctattacggttatgcacgcgctcgttggtactgcaaagaatgtgcagaatcggtgaccgcttggggccgtgattatattgaaaccacgatccacgaaattgaagaacgctttggtttcaaagttctgtacgctgataccgacggctttttcgcgacgatcccgggtgcggatgccgaaaccgtgaagaaaaaggctaaggaattcctgaagtacatcaacgcgaaactgccgggcctgctggaactggaatatgaaggcttctacgtccgtggctttttcgtgaccaaaaagaaatacgcggttatcgacgaagaaggcaaaattaccacgcgcggtctggaaatcgtgcgccgtgattggagtgaaattgccaaagaaacccaggcacgtgtgctggaagctctgctgaaagatggcaatgttgaagaagcggtttccattgtcaaagaagtgacggaaaagctgggtaaatatgaagtcccgccggaaaaactggtgatccatgaacaaattacccgcgaactgaaggattacaaagcgacgggcccgcacgttgctatcgcgaaacgtctggcagcgcgtggcgtgaagattcgtccgggtaccgttatcagctatattgtcctgaaaggctctggtcgtatcggtgaccgcgcgattccgtttgatgaattcgacccgacgaaacatcgctacgatgcagaatattacatcgaaaaccaggttctgccggctgtcgaacgtattctgaaagcgtttggctatcgtgccgaagatctgcgctaccagaaaacccgtcaagtgggcctgggtgtttggctgcaaccgaaaggtaagaaataa

SEQ ID NO: 143 - DNA, 2325 bp, Artificial Sequence
  Synthetic
atgattctggacacggactatattacggaagatggcaagccggttatccgcattttcaagaaggaaaatggcgaattcaagatcgaatatgatcgtgaatttgaaccgtatatctacgctctgctgaaagatgacagcgcgatcgaagaagtgaaaaagattaccgctggccgccatggtcgtgtggttaaggtgaaacgcgcggaaaaagttaaaaagaaatttctgggccgtccgattgaagtgtggaaactgtatttcacccatccgcaggatgttccggccatccgtgacgaaattcgtcgccacagcgcagtcgtggatatctatgaatacgacattccgtttgcgaaacgctatctgatcgataagggcctgattccgatggaaggtgacgaagaactgaagatgatgagcttcgatatcgaaaccctgtatcacgaaggcgaagaattcggcacgggtccgatcctgatgatttcttacgcagacgaaggtgaagctcgtgtcatcacctggaagaaaattgatctgccgtatgtggaagttgtcagcacggaaaaggaaatgatcaaacgctttctgaaggtggttaaggaaaaagatccggacgtgctgattacctataacggtgataattttgacttcgcatacctgaagaaacgttgcgaaaaaatcggcattaagttcacgctgcgtcgcgacggttctgaaccgaaaatccagcgcatgggcgatcgttttgcggtcgaagtgaaaggtcgcattcatttcgatctgtatccggttatccgtcgcaccattaacctgccgacctatacgctggaagcggtttacgaagccgtctttggcaccccgaaggaaaaagtgtacccggaagaaattaccacggcctgggaaacgggcgaaggtctggaacgcgtcgcccgttatagtatggaagatgcaaaagtgacctacgaactgggtcgcgaatttttcccgatggaagcacagctgtcccgtctgatcggccaatcactgtgggatgtgtcgcgcagctctacgggtaacctggttgaatggttcctgctgcgtaaagcgtatgaacgcaacgaaattgcgccgaataaaccggatgaacgtgaactggcacgtcgccgtggcggttatgcaggcggttacgttaaagaaccggaacgcggcctgtgggataatatcgtctatctggactttatgagtctgtacccgtccattatcattacccataacgttagtccggacacgttcaatcgtgaaggctgcaaagaatatgataccgccccgcaggttggtcacaagttttgtaaagacgtccaaggcttcattccgagtctgctgggtgccctgctggatgaacgccagaaaatcaagaaacgtatgaaggcatccattgatccgctggaaaagaaactgctggactatcgccaaaaggcgatcaaaattctggccaactcatattacggctattacggttatgcacgcgctcgttggtactgcaaagaatgtgcagaatcggtgaccgcttggggccgtgattatattgaaaccacgatccacgaaattgaagaacgctttggtttcaaagttctgtacgctgataccgacggctttttcgcgacgatcccgggtgcggatgccgaaaccgtgaagaaaaaggctaaggaattcctgaagtacatcaacgcgaaactgccgggcctgctggaactggaatatgaaggcttctacgtccgtggctttttcgtgaccaaaaagaaatacgcggttatcgacgaagaaggcaaaattaccacgcgcggtctggaaatcgtgcgccgtgattggagtgaaattgccaaagaaacccaggcaaaggttctggaagcaattctgaaacatggtaacgtcgaagaagcggtcaagatcgtgaaagaagttaccgaaaaactgtcgaattatgaaattccggtcgaaaagctggtgatctacgaacaaattacgcgcccgctgaacgaatataaagccattggcccgcacgtggcagttgctaaacgtctggcggccaagggtatcaagattaaaccgggcatggtgattggttatgttgtcctgcgcggcgatggtccgatcagcaaacgtgcgatcgccatcgaagaattcgatggcaaaaagcataagtacgacgcagaatactacatcgaaaatcaggttctgccggccgtcgaacgtatcctgaaagcattcggttataagcgtgaagatctgcgctggcagaagaccaaacaagtgggcctgggtgcgtggctgaaagttaaaaagtcttaa

SEQ ID NO: 144 - DNA, 2328 bp, Artificial Sequence
  Synthetic
atgattctggacacggactatattacggaagatggcaagccggttatccgcattttcaagaaggaaaatggcgaattcaagatcgaatatgatcgtgaatttgaaccgtatatctacgctctgctgaaagatgacagcgcgatcgaagaagtgaaaaagattaccgctggccgccatggtcgtgtggttaaggtgaaacgcgcggaaaaagttaaaaagaaatttctgggccgtccgattgaagtgtggaaactgtatttcacccatccgcaggatgttccggccatccgtgacgaaattcgtcgccacagcgcagtcgtggatatctatgaatacgacattccgtttgcgaaacgctatctgatcgataagggcctgattccgatggaaggtgacgaagaactgaagatgatgagcttcgatatcgaaaccctgtatcacgaaggcgaagaattcggcacgggtccgatcctgatgatttcttacgcagacgaaggtgaagctcgtgtcatcacctggaagaaaattgatctgccgtatgtggaagttgtcagcacggaaaaggaaatgatcaaacgctttctgaaggtggttaaggaaaaagatccggacgtgctgattacctataacggtgataattttgacttcgcatacctgaagaaacgttgcgaaaaaatcggcattaagttcacgctgcgtcgcgacggttctgaaccgaaaatccagcgcatgggcgatcgttttgcggtcgaagtgaaaggtcgcattcatttcgatctgtatccggttatccgtcgcaccattaacctgccgacctatacgctggaagcggtttacgaagccgtctttggcaccccgaaggaaaaagtgtacccggaagaaattaccacggcctgggaaacgggcgaaggtctggaacgcgtcgcccgttatagtatggaagatgcaaaagtgacctacgaactgggtcgcgaatttttcccgatggaagcacagctgtcccgtctgatcggccaatcactgtgggatgtgtcgcgcagctctacgggtaacctggttgaatggttcctgctgcgtaaagcgtatgaacgcaacgaaattgcgccgaataaaccggatgaacgtgaactggcacgtcgccgtggcggttatgcaggcggttacgttaaagaaccggaacgcggcctgtgggataatatcgtctatctggactttatgagtctgtacccgtccattatcattacccataacgttagtccggacacgttcaatcgtgaaggctgcaaagaatatgataccgccccgcaggttggtcacaagttttgtaaagacgtccaaggcttcattccgagtctgctgggtgccctgctggatgaacgccagaaaatcaagaaacgtatgaaggcatccattgatccgctggaaaagaaactgctggactatcgccaaaaggcgatcaaaattctggccaactcatattacggctattacggttatgcacgcgctcgttggtactgcaaagaatgtgcagaatcggtgaccgcttggggccgtgattatattgaaaccacgatccacgaaattgaagaacgctttggtttcaaagttctgtacgctgataccgacggctttttcgcgacgatcccgggtgcggatgccgaaaccgtgaagaaaaaggctaaggaattcctgaagtacatcaacgcgaaactgccgggcctgctggaactggaatatgaaggcttctacgtccgtggctttttcgtgaccaaaaagaaatacgcggttatcgacgaagaaggcaaaattaccacgcgcggtctggaaatcgtgcgccgtgattggagtgaaattgccaaagaaacccaggcacgtgttctggaagcactgctgaaagatggtaatgtcgaagaagcagtgagtattgttaaagaagtcacggaaaaactgtccaagtatgaagtcccgccggaaaaactggtgattcatgaacaaatcacccgcgaactgaaagattacaaggcgacgggcccgcacgtggcaattgctaaacgtctggcagcgcgtggcgttaagatccgtccgggtaccgttattagctatatcgtcctgaaaggctctggtcgtattggtgaccgcgccatcccgtttgatgaattcgacccggctaaacaccgctacgatgcggaatattacattgaaaatcaggtcctgccggctgtggaacgtatcctgaaagcgtttggctatcgtaaggaagatctgcgctaccagaaaacccgtcaagtgggcctgggtgcgtggctgaaaccgaagggtaaaaagtaa

SEQ ID NO: 145 - DNA, 2328 bp, Artificial Sequence
  Synthetic
atgattctggacacggactatattacggaagatggcaagccggttatccgcattttcaagaaggaaaatggcgaattcaagatcgaatatgatcgtgaatttgaaccgtatatctacgctctgctgaaagatgacagcgcgatcgaagaagtgaaaaagattaccgctggccgccatggtcgtgtggttaaggtgaaacgcgcggaaaaagttaaaaagaaatttctgggccgtccgattgaagtgtggaaactgtatttcacccatccgcaggatgttccggccatccgtgacgaaattcgtcgccacagcgcagtcgtggatatctatgaatacgacattccgtttgcgaaacgctatctgatcgataagggcctgattccgatggaaggtgacgaagaactgaagatgatgagcttcgatatcgaaaccctgtatcacgaaggcgaagaattcggcacgggtccgatcctgatgatttcttacgcagacgaaggtgaagctcgtgtcatcacctggaagaaaattgatctgccgtatgtggaagttgtcagcacggaaaaggaaatgatcaaacgctttctgaaggtggttaaggaaaaagatccggacgtgctgattacctataacggtgataattttgacttcgcatacctgaagaaacgttgcgaaaaaatcggcattaagttcacgctgcgtcgcgacggttctgaaccgaaaatccagcgcatgggcgatcgttttgcggtcgaagtgaaaggtcgcattcatttcgatctgtatccggttatccgtcgcaccattaacctgccgacctatacgctggaagcggtttacgaagccgtctttggcaccccgaaggaaaaagtgtacccggaagaaattaccacggcctgggaaacgggcgaaggtctggaacgcgtcgcccgttatagtatggaagatgcaaaagtgacctacgaactgggtcgcgaatttttcccgatggaagcacagctgtcccgtctgatcggccaatcactgtgggatgtgtcgcgcagctctacgggtaacctggttgaatggttcctgctgcgtaaagcgtatgaacgcaacgaaattgcgccgaataaaccggatgaacgtgaactggcacgtcgccgtggcggttatgcaggcggttacgttaaagaaccggaacgcggcctgtgggataatatcgtctatctggactttatgagtctgtacccgtccattatcattacccataacgttagtccggacacgttcaatcgtgaaggctgcaaagaatatgataccgccccgcaggttggtcacaagttttgtaaagacgtccaaggcttcattccgagtctgctgggtgccctgctggatgaacgccagaaaatcaagaaacgtatgaaggcatccattgatccgctggaaaagaaactgctggactatcgccaaaaggcgatcaaaattctggccaactcatattacggctattacggttatgcacgcgctcgttggtactgcaaagaatgtgcagaatcggtgaccgcttggggccgtgattatattgaaaccacgatccacgaaattgaagaacgctttggtttcaaagttctgtacgctgataccgacggctttttcgcgacgatcccgggtgcggatgccgaaaccgtgaagaaaaaggctaaggaattcctgaagtacatcaacgcgaaactgccgggcctgctggaactggaatatgaaggcttctacgtccgtggctttttcgtgaccaaaaagaaatacgcggttatcgacgaagaaggcaaaattaccacgcgcggtctggaaatcgtgcgccgtgattggagtgaaattgccaaagaaacccaggcacgcgtcctggaagcaatcctgaaagatggtgacgtggaagaagccgtccgtattgtgaaagaagttacggaaaaactgtccaaatatgaagttccgccggaaaaactggtcatccatgaacaaattacccgcgaactgaaagattacaaagcgacgggcccgcacgtcgcaatcgctaaacgtctggcggcgcgtggcgtgaaaattcgtccgggtaccgtgatctcatatattgttctgaaaggctcgggtcgtatcggtgaccgcgctattccgtttgatgaattcgacccgaaaaaacacaaatacgatgcggaatactacatcgaaaaccaggttctgccggccgtcgaacgtattctgcgcgcatttggctaccgtaaagaagatctgcgttatcaaaaaaccaaacaagtgggtctgggtgcgtggctgaaaccgaaaggtaaaaaataa

SEQ ID NO: 146 - DNA, 2325 bp, Artificial Sequence
  Synthetic
atgattctggacacggactatattacggaagatggcaagccggttatccgcattttcaagaaggaaaatggcgaattcaagatcgaatatgatcgtgaatttgaaccgtatatctacgctctgctgaaagatgacagcgcgatcgaagaagtgaaaaagattaccgctggccgccatggtcgtgtggttaaggtgaaacgcgcggaaaaagttaaaaagaaatttctgggccgtccgattgaagtgtggaaactgtatttcacccatccgcaggatgttccggccatccgtgacgaaattcgtcgccacagcgcagtcgtggatatctatgaatacgacattccgtttgcgaaacgctatctgatcgataagggcctgattccgatggaaggtgacgaagaactgaagatgatgagcttcgatatcgaaaccctgtatcacgaaggcgaagaattcggcacgggtccgatcctgatgatttcttacgcagacgaaggtgaagctcgtgtcatcacctggaagaaaattgatctgccgtatgtggaagttgtcagcacggaaaaggaaatgatcaaacgctttctgaaggtggttaaggaaaaagatccggacgtgctgattacctataacggtgataattttgacttcgcatacctgaagaaacgttgcgaaaaaatcggcattaagttcacgctgcgtcgcgacggttctgaaccgaaaatccagcgcatgggcgatcgttttgcggtcgaagtgaaaggtcgcattcatttcgatctgtatccggttatccgtcgcaccattaacctgccgacctatacgctggaagcggtttacgaagccgtctttggcaccccgaaggaaaaagtgtacccggaagaaattaccacggcctgggaaacgggcgaaggtctggaacgcgtcgcccgttatagtatggaagatgcaaaagtgacctacgaactgggtcgcgaatttttcccgatggaagcacagctgtcccgtctgatcggccaatcactgtgggatgtgtcgcgcagctctacgggtaacctggttgaatggttcctgctgcgtaaagcgtatgaacgcaacgaaattgcgccgaataaaccggatgaacgtgaactggcacgtcgccgtggcggttatgcaggcggttacgttaaagaaccggaacgcggcctgtgggataatatcgtctatctggactttatgagtctgtacccgtccattatcattacccataacgttagtccggacacgttcaatcgtgaaggctgcaaagaatatgataccgccccgcaggttggtcacaagttttgtaaagacgtccaaggcttcattccgagtctgctgggtgccctgctggatgaacgccagaaaatcaagaaacgtatgaaggcatccattgatccgctggaaaagaaactgctggactatcgccaaaaggcgatcaaaattctggccaactcatattacggctattacggttatgcacgcgctcgttggtactgcaaagaatgtgcagaatcggtgaccgcttggggccgtgattatattgaaaccacgatccacgaaattgaagaacgctttggtttcaaagttctgtacgctgataccgacggctttttcgcgacgatcccgggtgcggatgccgaaaccgtgaagaaaaaggctaaggaattcctgaagtacatcaacgcgaaactgccgggcctgctggaactggaatatgaaggcttctacgtccgtggctttttcgtgaccaaaaagaaatacgcggttatcgacgaagaaggcaaaattaccacgcgcggtctggaaatcgtgcgccgtgattggagtgaaattgccaaagaaacccaggcacgtgttctggaagcaattctgaaacatggtaacgtcgaagaagcggtcaaaatcgtgaaagaagttacggaaaaactgtctaactacgaaattccgccggaaaaactggccatctacgaacaaattacccgcccgctgcatgaatataaagcaatcggtccgcacgtcgcagtggcaaaacgtctggcagcacgcggcgttaaagtcaaaccgggtatggtcatcggctatattgtgctgcgtggtgatggcccgatcagcaaccgcgcaattctggctgaagaatacgatctgaaaaaacacaaatacgacgccgaatattacatcgaaaatcaggttctgccggctgtcctgcgtattctggaagcgtttggctatcgtaaagaagatctgcgctggcagaaaacccgtcaaacgggtctgacctcatggctgaatattaaaaaatcgtaa

SEQ ID NO: 147 - DNA, 2325 bp, Artificial Sequence
  Synthetic
atgattctggacacggactatattacggaagatggcaagccggttatccgcattttcaagaaggaaaatggcgaattcaagatcgaatatgatcgtgaatttgaaccgtatatctacgctctgctgaaagatgacagcgcgatcgaagaagtgaaaaagattaccgctggccgccatggtcgtgtggttaaggtgaaacgcgcggaaaaagttaaaaagaaatttctgggccgtccgattgaagtgtggaaactgtatttcacccatccgcaggatgttccggccatccgtgacgaaattcgtcgccacagcgcagtcgtggatatctatgaatacgacattccgtttgcgaaacgctatctgatcgataagggcctgattccgatggaaggtgacgaagaactgaagatgatgagcttcgatatcgaaaccctgtatcacgaaggcgaagaattcggcacgggtccgatcctgatgatttcttacgcagacgaaggtgaagctcgtgtcatcacctggaagaaaattgatctgccgtatgtggaagttgtcagcacggaaaaggaaatgatcaaacgctttctgaaggtggttaaggaaaaagatccggacgtgctgattacctataacggtgataattttgacttcgcatacctgaagaaacgttgcgaaaaaatcggcattaagttcacgctgcgtcgcgacggttctgaaccgaaaatccagcgcatgggcgatcgttttgcggtcgaagtgaaaggtcgcattcatttcgatctgtatccggttatccgtcgcaccattaacctgccgacctatacgctggaagcggtttacgaagccgtctttggcaccccgaaggaaaaagtgtacccggaagaaattaccacggcctgggaaacgggcgaaggtctggaacgcgtcgcccgttatagtatggaagatgcaaaagtgacctacgaactgggtcgcgaatttttcccgatggaagcacagctgtcccgtctgatcggccaatcactgtgggatgtgtcgcgcagctctacgggtaacctggttgaatggttcctgctgcgtaaagcgtatgaacgcaacgaaattgcgccgaataaaccggatgaacgtgaactggcacgtcgccgtggcggttatgcaggcggttacgttaaagaaccggaacgcggcctgtgggataatatcgtctatctggactttatgagtctgtacccgtccattatcattacccataacgttagtccggacacgttcaatcgtgaaggctgcaaagaatatgataccgccccgcaggttggtcacaagttttgtaaagacgtccaaggcttcattccgagtctgctgggtgccctgctggatgaacgccagaaaatcaagaaacgtatgaaggcatccattgatccgctggaaaagaaactgctggactatcgccaaaaggcgatcaaaattctggccaactcatattacggctattacggttatgcacgcgctcgttggtactgcaaagaatgtgcagaatcggtgaccgcttggggccgtgattatattgaaaccacgatccacgaaattgaagaacgctttggtttcaaagttctgtacgctgataccgacggctttttcgcgacgatcccgggtgcggatgccgaaaccgtgaagaaaaaggctaaggaattcctgaagtacatcaacgcgaaactgccgggcctgctggaactggaatatgaaggcttctacgtccgtggctttttcgtgaccaaaaagaaatacgcggttatcgacgaagaaggcaaaattaccacgcgcggtctggaaatcgtgcgccgtgattggagtgaaattgccaaagaaacccaggcaaaagttctggaagcaatcctgaaacatggtaatgtcgaagaagcagtgaaaattgtcaaggaagtgacggaaaaactgtcgaagtatgaaatcccgccggaaaaactggtgatctacgaacaaattacccgcccgctgcatgaatataaagcgattggcccgcacgtggcagttgctaaacgtctggcagcccgcggtgtcaaagtgcgtccgggcatggtgatcggttatattgttctgcgtggcgatggtccgatcagtaaacgcgcgattctggccgaagaatttgatccgcgcaaacacaagtacgacgccgaatattacatcgaaaaccaggtgctgccggctgttctgcgtattctggaagcgttcggctatcgtaaagaagatctgcgctggcagaaaaccaagcaaacgggtctgaccgcatggctgaatgtgaaaaagaaataa

SEQ ID NO: 148 - DNA, 2328 bp, Artificial Sequence
  Synthetic
atgattctggacacggactatattacggaagatggcaagccggttatccgcattttcaagaaggaaaatggcgaattcaagatcgaatatgatcgtgaatttgaaccgtatatctacgctctgctgaaagatgacagcgcgatcgaagaagtgaaaaagattaccgctggccgccatggtcgtgtggttaaggtgaaacgcgcggaaaaagttaaaaagaaatttctgggccgtccgattgaagtgtggaaactgtatttcacccatccgcaggatgttccggccatccgtgacgaaattcgtcgccacagcgcagtcgtggatatctatgaatacgacattccgtttgcgaaacgctatctgatcgataagggcctgattccgatggaaggtgacgaagaactgaagatgatgagcttcgatatcgaaaccctgtatcacgaaggcgaagaattcggcacgggtccgatcctgatgatttcttacgcagacgaaggtgaagctcgtgtcatcacctggaagaaaattgatctgccgtatgtggaagttgtcagcacggaaaaggaaatgatcaaacgctttctgaaggtggttaaggaaaaagatccggacgtgctgattacctataacggtgataattttgacttcgcatacctgaagaaacgttgcgaaaaaatcggcattaagttcacgctgcgtcgcgacggttctgaaccgaaaatccagcgcatgggcgatcgttttgcggtcgaagtgaaaggtcgcattcatttcgatctgtatccggttatccgtcgcaccattaacctgccgacctatacgctggaagcggtttacgaagccgtctttggcaccccgaaggaaaaagtgtacccggaagaaattaccacggcctgggaaacgggcgaaggtctggaacgcgtcgcccgttatagtatggaagatgcaaaagtgacctacgaactgggtcgcgaatttttcccgatggaagcacagctgtcccgtctgatcggccaatcactgtgggatgtgtcgcgcagctctacgggtaacctggttgaatggttcctgctgcgtaaagcgtatgaacgcaacgaactggctccgaataagccggatgaacgcgaactggttcgtcgccgtaacagctataccggcggttacgtcaaagaaccggaacgcggcctgtgggataatatcgtttatctggactttcgtagtctgtacccgtccattatcattacccataacgtgtcaccggacacgctgaatcgtgaaggctgcaaagaatatgatgaagccccgcaagtgggtcacaagttctgtaaagactttccgggcttcattccgtcgctgctgggtaacctgctggatgaacgccagaaaatcaagaaacgtatgaaggcaaccattgatccgctggaaaagaaactgctggactatcgtcaacgcgctatcaaaattctggcgaattcttattacggctattacgcgtatgcgcgtgcgcgctggtactgcaaagaatgtgccgaaagtgtgaccgcatggggccgcgaatatattgaaatgtccatccgtgaaatcgaagaaaagtacggtttcaaggttctgtacgcggataccgacggtttccacgcaacgatcccgggtgccgatgcagaaaccgtgaagaaaaaggcgatggaattcctgaagtacatcaacgctaagctgccgggtgcgctggaactggaatatgaaggcttctacaaacgtggctttttcgtgacgaaaaagaaatacgccgttatcgacgaagaaggcaaaattaccacgcgcggtctggaaatcgtgcgccgtgattggagtgaaattgccaaagaaacccaggcacgcgttctggaagcaatcctgcgtcatggtgacgtcgaagaagccgttcgcattgtcaaagatgtgacggaaaagctgtcgaaatatgaagtcccgccggaaaaactggtgatccatgaacaaattacccgtgaactgaaggattacaaagcgacgggcccgcacgttgcaattgctaaacgcctggcagcccgtggcatcaagattcgtccgggtaccgttatcagctatattgtcctgaaaggctctggtcgcatcggtgatcgtgctattccgtttgatgaattcgacccgacgaaacaccgttacgatgccgaatattacatcgaaaatcaggtgctgccggccgttgaacgcattctgaaagcatttggctataagaaagaagaactgcgctaccagaaaacccgtcaagtgggcctgggtgcgtggctgaagctgaaaggtaagaaataa

SEQ ID NO: 149 - DNA, 2322 bp, Artificial Sequence
  Synthetic
atgattctggacacggactatattacggaagatggcaagccggttatccgcattttcaagaaggaaaatggcgaattcaagatcgaatatgatcgtgaatttgaaccgtatatctacgctctgctgaaagatgacagcgcgatcgaagaagtgaaaaagattaccgctggccgccatggtcgtgtggttaaggtgaaacgcgcggaaaaagttaaaaagaaatttctgggccgtccgattgaagtgtggaaactgtatttcacccatccgcaggatgttccggccatccgtgacgaaattcgtcgccacagcgcagtcgtggatatctatgaatacgacattccgtttgcgaaacgctatctgatcgataagggcctgattccgatggaaggtgacgaagaactgaagatgatgagcttcgatatcgaaaccctgtatcacgaaggcgaagaattcggcacgggtccgatcctgatgatttcttacgcagacgaaggtgaagctcgtgtcatcacctggaagaaaattgatctgccgtatgtggaagttgtcagcacggaaaaggaaatgatcaaacgctttctgaaggtggttaaggaaaaagatccggacgtgctgattacctataacggtgataattttgacttcgcatacctgaagaaacgttgcgaaaaaatcggcattaagttcacgctgcgtcgcgacggttctgaaccgaaaatccagcgcatgggcgatcgttttgcggtcgaagtgaaaggtcgcattcatttcgatctgtatccggttatccgtcgcaccattaacctgccgacctatacgctggaagcggtttacgaagccgtctttggcaccccgaaggaaaaagtgtacccggaagaaattaccacggcctgggaaacgggcgaaggtctggaacgcgtcgcccgttatagtatggaagatgcaaaagtgacctacgaactgggtcgcgaatttttcccgatggaagcacagctgtcccgtctgatcggccaatcactgtgggatgtgtcgcgcagctctacgggtaacctggttgaatggttcctgctgcgtaaagcgtatgaacgcaacgaactggctccgaataagccggatgaacgcgaactggttcgtcgccgtaacagctataccggcggttacgtcaaagaaccggaacgcggcctgtgggataatatcgtttatctggactttcgtagtctgtacccgtccattatcattacccataacgtgtcaccggacacgctgaatcgtgaaggctgcaaagaatatgatgaagccccgcaagtgggtcacaagttctgtaaagactttccgggcttcattccgtcgctgctgggtaacctgctggatgaacgccagaaaatcaagaaacgtatgaaggcaaccattgatccgctggaaaagaaactgctggactatcgtcaacgcgctatcaaaattctggcgaattcttattacggctattacgcgtatgcgcgtgcgcgctggtactgcaaagaatgtgccgaaagtgtgaccgcatggggccgcgaatatattgaaatgtccatccgtgaaatcgaagaaaagtacggtttcaaggttctgtacgcggataccgacggtttccacgcaacgatcccgggtgccgatgcagaaaccgtgaagaaaaaggcgatggaattcctgaagtacatcaacgctaagctgccgggtgcgctggaactggaatatgaaggcttctacaaacgtggctttttcgtgacgaaaaagaaatacgccgttatcgacgaagaaggcaaaattaccacgcgcggtctggaaatcgtgcgccgtgattggagtgaaattgccaaagaaacccaggcacgtgtcctggaagcaatcctgaaacatggtgatgtggaagaagcggttcgcattgtcaaagaagtgacggaaaagctgtcgaaatatgaagttccgccggaaaaactggtcatccatgaacaaattacccgcgatctgcgtgactacaaagccacgggtccgcacgtggcagttgcaaaacgtctggcagcccgtggcgtgaagattcgtccgggtaccgtgatcagttatattgttctgaaaggctccggtcgcatcggtgaccgtgctattccgtttgatgaattcgacccgacgaaacaccgttacgatgccgaatattacatcgaaaatcaggtcctgccggccgtggaacgcattctgaaagcatttggttatcgcaaggaagatctgcgttaccagaagaccaaacaagtcggcctgggtgcgtggctgaaagtgaaaaagtaa

SEQ ID NO: 150 - DNA, 2328 bp, Artificial Sequence
  Synthetic
atgattctggacacggactatattacggaagatggcaagccggttatccgcattttcaagaaggaaaatggcgaattcaagatcgaatatgatcgtgaatttgaaccgtatatctacgctctgctgaaagatgacagcgcgatcgaagaagtgaaaaagattaccgctggccgccatggtcgtgtggttaaggtgaaacgcgcggaaaaagttaaaaagaaatttctgggccgtccgattgaagtgtggaaactgtatttcacccatccgcaggatgttccggccatccgtgacgaaattcgtcgccacagcgcagtcgtggatatctatgaatacgacattccgtttgcgaaacgctatctgatcgataagggcctgattccgatggaaggtgacgaagaactgaagatgatgagcttcgatatcgaaaccctgtatcacgaaggcgaagaattcggcacgggtccgatcctgatgatttcttacgcagacgaaggtgaagctcgtgtcatcacctggaagaaaattgatctgccgtatgtggaagttgtcagcacggaaaaggaaatgatcaaacgctttctgaaggtggttaaggaaaaagatccggacgtgctgattacctataacggtgataattttgacttcgcatacctgaagaaacgttgcgaaaaaatcggcattaagttcacgctgcgtcgcgacggttctgaaccgaaaatccagcgcatgggcgatcgttttgcggtcgaagtgaaaggtcgcattcatttcgatctgtatccggttatccgtcgcaccattaacctgccgacctatacgctggaagcggtttacgaagccgtctttggcaccccgaaggaaaaagtgtacccggaagaaattaccacggcctgggaaacgggcgaaggtctggaacgcgtcgcccgttatagtatggaagatgcaaaagtgacctacgaactgggtcgcgaatttttcccgatggaagcacagctgtcccgtctgatcggccaatcactgtgggatgtgtcgcgcagctctacgggtaacctggttgaatggttcctgctgcgtaaagcgtatgaacgcaacgaactggctccgaataagccggatgaacgcgaactggttcgtcgccgtaacagctataccggcggttacgtcaaagaaccggaacgcggcctgtgggataatatcgtttatctggactttcgtagtctgtacccgtccattatcattacccataacgtgtcaccggacacgctgaatcgtgaaggctgcaaagaatatgatgaagccccgcaagtgggtcacaagttctgtaaagactttccgggcttcattccgtcgctgctgggtaacctgctggatgaacgccagaaaatcaagaaacgtatgaaggcaaccattgatccgctggaaaagaaactgctggactatcgtcaacgcgctatcaaaattctggcgaattcttattacggctattacgcgtatgcgcgtgcgcgctggtactgcaaagaatgtgccgaaagtgtgaccgcatggggccgcgaatatattgaaatgtccatccgtgaaatcgaagaaaagtacggtttcaaggttctgtacgcggataccgacggtttccacgcaacgatcccgggtgccgatgcagaaaccgtgaagaaaaaggcgatggaattcctgaagtacatcaacgctaagctgccgggtgcgctggaactggaatatgaaggcttctacaaacgtggctttttcgtgacgaaaaagaaatacgccgttatcgacgaagaaggcaaaattaccacgcgcggtctggaaatcgtgcgccgtgattggagtgaaattgccaaagaaacccaggcacgtgtgctggaagctctgctgaaagatggcaatgttgaagaagcggtttccattgtcaaagaagtgacggaaaagctgggtaaatatgaagtcccgccggaaaaactggtgatccatgaacaaattacccgcgaactgaaggattacaaagcgacgggcccgcacgttgctatcgcgaaacgtctggcagcgcgtggcgtgaagattcgtccgggtaccgttatcagctatattgtcctgaaaggctctggtcgtatcggtgaccgcgcgattccgtttgatgaattcgacccgacgaaacatcgctacgatgcagaatattacatcgaaaaccaggttctgccggctgtcgaacgtattctgaaagcgtttggctatcgtgccgaagatctgcgctaccagaaaacccgtcaagtgggcctgggtgtttggctgcaaccgaaaggtaagaaataa

SEQ ID NO: 151 - DNA, 2325 bp, Artificial Sequence
  Synthetic
atgattctggacacggactatattacggaagatggcaagccggttatccgcattttcaagaaggaaaatggcgaattcaagatcgaatatgatcgtgaatttgaaccgtatatctacgctctgctgaaagatgacagcgcgatcgaagaagtgaaaaagattaccgctggccgccatggtcgtgtggttaaggtgaaacgcgcggaaaaagttaaaaagaaatttctgggccgtccgattgaagtgtggaaactgtatttcacccatccgcaggatgttccggccatccgtgacgaaattcgtcgccacagcgcagtcgtggatatctatgaatacgacattccgtttgcgaaacgctatctgatcgataagggcctgattccgatggaaggtgacgaagaactgaagatgatgagcttcgatatcgaaaccctgtatcacgaaggcgaagaattcggcacgggtccgatcctgatgatttcttacgcagacgaaggtgaagctcgtgtcatcacctggaagaaaattgatctgccgtatgtggaagttgtcagcacggaaaaggaaatgatcaaacgctttctgaaggtggttaaggaaaaagatccggacgtgctgattacctataacggtgataattttgacttcgcatacctgaagaaacgttgcgaaaaaatcggcattaagttcacgctgcgtcgcgacggttctgaaccgaaaatccagcgcatgggcgatcgttttgcggtcgaagtgaaaggtcgcattcatttcgatctgtatccggttatccgtcgcaccattaacctgccgacctatacgctggaagcggtttacgaagccgtctttggcaccccgaaggaaaaagtgtacccggaagaaattaccacggcctgggaaacgggcgaaggtctggaacgcgtcgcccgttatagtatggaagatgcaaaagtgacctacgaactgggtcgcgaatttttcccgatggaagcacagctgtcccgtctgatcggccaatcactgtgggatgtgtcgcgcagctctacgggtaacctggttgaatggttcctgctgcgtaaagcgtatgaacgcaacgaactggctccgaataagccggatgaacgcgaactggttcgtcgccgtaacagctataccggcggttacgtcaaagaaccggaacgcggcctgtgggataatatcgtttatctggactttcgtagtctgtacccgtccattatcattacccataacgtgtcaccggacacgctgaatcgtgaaggctgcaaagaatatgatgaagccccgcaagtgggtcacaagttctgtaaagactttccgggcttcattccgtcgctgctgggtaacctgctggatgaacgccagaaaatcaagaaacgtatgaaggcaaccattgatccgctggaaaagaaactgctggactatcgtcaacgcgctatcaaaattctggcgaattcttattacggctattacgcgtatgcgcgtgcgcgctggtactgcaaagaatgtgccgaaagtgtgaccgcatggggccgcgaatatattgaaatgtccatccgtgaaatcgaagaaaagtacggtttcaaggttctgtacgcggataccgacggtttccacgcaacgatcccgggtgccgatgcagaaaccgtgaagaaaaaggcgatggaattcctgaagtacatcaacgctaagctgccgggtgcgctggaactggaatatgaaggcttctacaaacgtggctttttcgtgacgaaaaagaaatacgccgttatcgacgaagaaggcaaaattaccacgcgcggtctggaaatcgtgcgccgtgattggagtgaaattgccaaagaaacccaggcaaaggttctggaagcaattctgaaacatggtaacgtcgaagaagcggtcaagatcgtgaaagaagttaccgaaaaactgtcgaattatgaaattccggtcgaaaagctggtgatctacgaacaaattacgcgcccgctgaacgaatataaagccattggcccgcacgtggcagttgctaaacgtctggcggccaagggtatcaagattaaaccgggcatggtgattggttatgttgtcctgcgcggcgatggtccgatcagcaaacgtgcgatcgccatcgaagaattcgatggcaaaaagcataagtacgacgcagaatactacatcgaaaatcaggttctgccggccgtcgaacgtatcctgaaagcattcggttataagcgtgaagatctgcgctggcagaagaccaaacaagtgggcctgggtgcgtggctgaaagttaaaaagtcttaa

SEQ ID NO: 152 - DNA, 2328 bp, Artificial Sequence
  Synthetic
atgattctggacacggactatattacggaagatggcaagccggttatccgcattttcaagaaggaaaatggcgaattcaagatcgaatatgatcgtgaatttgaaccgtatatctacgctctgctgaaagatgacagcgcgatcgaagaagtgaaaaagattaccgctggccgccatggtcgtgtggttaaggtgaaacgcgcggaaaaagttaaaaagaaatttctgggccgtccgattgaagtgtggaaactgtatttcacccatccgcaggatgttccggccatccgtgacgaaattcgtcgccacagcgcagtcgtggatatctatgaatacgacattccgtttgcgaaacgctatctgatcgataagggcctgattccgatggaaggtgacgaagaactgaagatgatgagcttcgatatcgaaaccctgtatcacgaaggcgaagaattcggcacgggtccgatcctgatgatttcttacgcagacgaaggtgaagctcgtgtcatcacctggaagaaaattgatctgccgtatgtggaagttgtcagcacggaaaaggaaatgatcaaacgctttctgaaggtggttaaggaaaaagatccggacgtgctgattacctataacggtgataattttgacttcgcatacctgaagaaacgttgcgaaaaaatcggcattaagttcacgctgcgtcgcgacggttctgaaccgaaaatccagcgcatgggcgatcgttttgcggtcgaagtgaaaggtcgcattcatttcgatctgtatccggttatccgtcgcaccattaacctgccgacctatacgctggaagcggtttacgaagccgtctttggcaccccgaaggaaaaagtgtacccggaagaaattaccacggcctgggaaacgggcgaaggtctggaacgcgtcgcccgttatagtatggaagatgcaaaagtgacctacgaactgggtcgcgaatttttcccgatggaagcacagctgtcccgtctgatcggccaatcactgtgggatgtgtcgcgcagctctacgggtaacctggttgaatggttcctgctgcgtaaagcgtatgaacgcaacgaactggctccgaataagccggatgaacgcgaactggttcgtcgccgtaacagctataccggcggttacgtcaaagaaccggaacgcggcctgtgggataatatcgtttatctggactttcgtagtctgtacccgtccattatcattacccataacgtgtcaccggacacgctgaatcgtgaaggctgcaaagaatatgatgaagccccgcaagtgggtcacaagttctgtaaagactttccgggcttcattccgtcgctgctgggtaacctgctggatgaacgccagaaaatcaagaaacgtatgaaggcaaccattgatccgctggaaaagaaactgctggactatcgtcaacgcgctatcaaaattctggcgaattcttattacggctattacgcgtatgcgcgtgcgcgctggtactgcaaagaatgtgccgaaagtgtgaccgcatggggccgcgaatatattgaaatgtccatccgtgaaatcgaagaaaagtacggtttcaaggttctgtacgcggataccgacggtttccacgcaacgatcccgggtgccgatgcagaaaccgtgaagaaaaaggcgatggaattcctgaagtacatcaacgctaagctgccgggtgcgctggaactggaatatgaaggcttctacaaacgtggctttttcgtgacgaaaaagaaatacgccgttatcgacgaagaaggcaaaattaccacgcgcggtctggaaatcgtgcgccgtgattggagtgaaattgccaaagaaacccaggcacgtgttctggaagcactgctgaaagatggtaatgtcgaagaagcagtgagtattgttaaagaagtcacggaaaaactgtccaagtatgaagtcccgccggaaaaactggtgattcatgaacaaatcacccgcgaactgaaagattacaaggcgacgggcccgcacgtggcaattgctaaacgtctggcagcgcgtggcgttaagatccgtccgggtaccgttattagctatatcgtcctgaaaggctctggtcgtattggtgaccgcgccatcccgtttgatgaattcgacccggctaaacaccgctacgatgcggaatattacattgaaaatcaggtcctgccggctgtggaacgtatcctgaaagcgtttggctatcgtaaggaagatctgcgctaccagaaaacccgtcaagtgggcctgggtgcgtggctgaaaccgaagggtaaaaagtaa

SEQ ID NO: 153 - DNA, 2328 bp, Artificial Sequence
  Synthetic
atgattctggacacggactatattacggaagatggcaagccggttatccgcattttcaagaaggaaaatggcgaattcaagatcgaatatgatcgtgaatttgaaccgtatatctacgctctgctgaaagatgacagcgcgatcgaagaagtgaaaaagattaccgctggccgccatggtcgtgtggttaaggtgaaacgcgcggaaaaagttaaaaagaaatttctgggccgtccgattgaagtgtggaaactgtatttcacccatccgcaggatgttccggccatccgtgacgaaattcgtcgccacagcgcagtcgtggatatctatgaatacgacattccgtttgcgaaacgctatctgatcgataagggcctgattccgatggaaggtgacgaagaactgaagatgatgagcttcgatatcgaaaccctgtatcacgaaggcgaagaattcggcacgggtccgatcctgatgatttcttacgcagacgaaggtgaagctcgtgtcatcacctggaagaaaattgatctgccgtatgtggaagttgtcagcacggaaaaggaaatgatcaaacgctttctgaaggtggttaaggaaaaagatccggacgtgctgattacctataacggtgataattttgacttcgcatacctgaagaaacgttgcgaaaaaatcggcattaagttcacgctgcgtcgcgacggttctgaaccgaaaatccagcgcatgggcgatcgttttgcggtcgaagtgaaaggtcgcattcatttcgatctgtatccggttatccgtcgcaccattaacctgccgacctatacgctggaagcggtttacgaagccgtctttggcaccccgaaggaaaaagtgtacccggaagaaattaccacggcctgggaaacgggcgaaggtctggaacgcgtcgcccgttatagtatggaagatgcaaaagtgacctacgaactgggtcgcgaatttttcccgatggaagcacagctgtcccgtctgatcggccaatcactgtgggatgtgtcgcgcagctctacgggtaacctggttgaatggttcctgctgcgtaaagcgtatgaacgcaacgaactggctccgaataagccggatgaacgcgaactggttcgtcgccgtaacagctataccggcggttacgtcaaagaaccggaacgcggcctgtgggataatatcgtttatctggactttcgtagtctgtacccgtccattatcattacccataacgtgtcaccggacacgctgaatcgtgaaggctgcaaagaatatgatgaagccccgcaagtgggtcacaagttctgtaaagactttccgggcttcattccgtcgctgctgggtaacctgctggatgaacgccagaaaatcaagaaacgtatgaaggcaaccattgatccgctggaaaagaaactgctggactatcgtcaacgcgctatcaaaattctggcgaattcttattacggctattacgcgtatgcgcgtgcgcgctggtactgcaaagaatgtgccgaaagtgtgaccgcatggggccgcgaatatattgaaatgtccatccgtgaaatcgaagaaaagtacggtttcaaggttctgtacgcggataccgacggtttccacgcaacgatcccgggtgccgatgcagaaaccgtgaagaaaaaggcgatggaattcctgaagtacatcaacgctaagctgccgggtgcgctggaactggaatatgaaggcttctacaaacgtggctttttcgtgacgaaaaagaaatacgccgttatcgacgaagaaggcaaaattaccacgcgcggtctggaaatcgtgcgccgtgattggagtgaaattgccaaagaaacccaggcacgcgtcctggaagcaatcctgaaagatggtgacgtggaagaagccgtccgtattgtgaaagaagttacggaaaaactgtccaaatatgaagttccgccggaaaaactggtcatccatgaacaaattacccgcgaactgaaagattacaaagcgacgggcccgcacgtcgcaatcgctaaacgtctggcggcgcgtggcgtgaaaattcgtccgggtaccgtgatctcatatattgttctgaaaggctcgggtcgtatcggtgaccgcgctattccgtttgatgaattcgacccgaaaaaacacaaatacgatgcggaatactacatcgaaaaccaggttctgccggccgtcgaacgtattctgcgcgcatttggctaccgtaaagaagatctgcgttatcaaaaaaccaaacaagtgggtctgggtgcgtggctgaaaccgaaaggtaaaaaataa

SEQ ID NO: 154 - DNA, 2325 bp, Artificial Sequence
  Synthetic
atgattctggacacggactatattacggaagatggcaagccggttatccgcattttcaagaaggaaaatggcgaattcaagatcgaatatgatcgtgaatttgaaccgtatatctacgctctgctgaaagatgacagcgcgatcgaagaagtgaaaaagattaccgctggccgccatggtcgtgtggttaaggtgaaacgcgcggaaaaagttaaaaagaaatttctgggccgtccgattgaagtgtggaaactgtatttcacccatccgcaggatgttccggccatccgtgacgaaattcgtcgccacagcgcagtcgtggatatctatgaatacgacattccgtttgcgaaacgctatctgatcgataagggcctgattccgatggaaggtgacgaagaactgaagatgatgagcttcgatatcgaaaccctgtatcacgaaggcgaagaattcggcacgggtccgatcctgatgatttcttacgcagacgaaggtgaagctcgtgtcatcacctggaagaaaattgatctgccgtatgtggaagttgtcagcacggaaaaggaaatgatcaaacgctttctgaaggtggttaaggaaaaagatccggacgtgctgattacctataacggtgataattttgacttcgcatacctgaagaaacgttgcgaaaaaatcggcattaagttcacgctgcgtcgcgacggttctgaaccgaaaatccagcgcatgggcgatcgttttgcggtcgaagtgaaaggtcgcattcatttcgatctgtatccggttatccgtcgcaccattaacctgccgacctatacgctggaagcggtttacgaagccgtctttggcaccccgaaggaaaaagtgtacccggaagaaattaccacggcctgggaaacgggcgaaggtctggaacgcgtcgcccgttatagtatggaagatgcaaaagtgacctacgaactgggtcgcgaatttttcccgatggaagcacagctgtcccgtctgatcggccaatcactgtgggatgtgtcgcgcagctctacgggtaacctggttgaatggttcctgctgcgtaaagcgtatgaacgcaacgaactggctccgaataagccggatgaacgcgaactggttcgtcgccgtaacagctataccggcggttacgtcaaagaaccggaacgcggcctgtgggataatatcgtttatctggactttcgtagtctgtacccgtccattatcattacccataacgtgtcaccggacacgctgaatcgtgaaggctgcaaagaatatgatgaagccccgcaagtgggtcacaagttctgtaaagactttccgggcttcattccgtcgctgctgggtaacctgctggatgaacgccagaaaatcaagaaacgtatgaaggcaaccattgatccgctggaaaagaaactgctggactatcgtcaacgcgctatcaaaattctggcgaattcttattacggctattacgcgtatgcgcgtgcgcgctggtactgcaaagaatgtgccgaaagtgtgaccgcatggggccgcgaatatattgaaatgtccatccgtgaaatcgaagaaaagtacggtttcaaggttctgtacgcggataccgacggtttccacgcaacgatcccgggtgccgatgcagaaaccgtgaagaaaaaggcgatggaattcctgaagtacatcaacgctaagctgccgggtgcgctggaactggaatatgaaggcttctacaaacgtggctttttcgtgacgaaaaagaaatacgccgttatcgacgaagaaggcaaaattaccacgcgcggtctggaaatcgtgcgccgtgattggagtgaaattgccaaagaaacccaggcacgtgttctggaagcaattctgaaacatggtaacgtcgaagaagcggtcaaaatcgtgaaagaagttacggaaaaactgtctaactacgaaattccgccggaaaaactggccatctacgaacaaattacccgcccgctgcatgaatataaagcaatcggtccgcacgtcgcagtggcaaaacgtctggcagcacgcggcgttaaagtcaaaccgggtatggtcatcggctatattgtgctgcgtggtgatggcccgatcagcaaccgcgcaattctggctgaagaatacgatctgaaaaaacacaaatacgacgccgaatattacatcgaaaatcaggttctgccggctgtcctgcgtattctggaagcgtttggctatcgtaaagaagatctgcgctggcagaaaacccgtcaaacgggtctgacctcatggctgaatattaaaaaatcgtaa

SEQ ID NO: 155 - DNA, 2325 bp, Artificial Sequence
  Synthetic
atgattctggacacggactatattacggaagatggcaagccggttatccgcattttcaagaaggaaaatggcgaattcaagatcgaatatgatcgtgaatttgaaccgtatatctacgctctgctgaaagatgacagcgcgatcgaagaagtgaaaaagattaccgctggccgccatggtcgtgtggttaaggtgaaacgcgcggaaaaagttaaaaagaaatttctgggccgtccgattgaagtgtggaaactgtatttcacccatccgcaggatgttccggccatccgtgacgaaattcgtcgccacagcgcagtcgtggatatctatgaatacgacattccgtttgcgaaacgctatctgatcgataagggcctgattccgatggaaggtgacgaagaactgaagatgatgagcttcgatatcgaaaccctgtatcacgaaggcgaagaattcggcacgggtccgatcctgatgatttcttacgcagacgaaggtgaagctcgtgtcatcacctggaagaaaattgatctgccgtatgtggaagttgtcagcacggaaaaggaaatgatcaaacgctttctgaaggtggttaaggaaaaagatccggacgtgctgattacctataacggtgataattttgacttcgcatacctgaagaaacgttgcgaaaaaatcggcattaagttcacgctgcgtcgcgacggttctgaaccgaaaatccagcgcatgggcgatcgttttgcggtcgaagtgaaaggtcgcattcatttcgatctgtatccggttatccgtcgcaccattaacctgccgacctatacgctggaagcggtttacgaagccgtctttggcaccccgaaggaaaaagtgtacccggaagaaattaccacggcctgggaaacgggcgaaggtctggaacgcgtcgcccgttatagtatggaagatgcaaaagtgacctacgaactgggtcgcgaatttttcccgatggaagcacagctgtcccgtctgatcggccaatcactgtgggatgtgtcgcgcagctctacgggtaacctggttgaatggttcctgctgcgtaaagcgtatgaacgcaacgaactggctccgaataagccggatgaacgcgaactggttcgtcgccgtaacagctataccggcggttacgtcaaagaaccggaacgcggcctgtgggataatatcgtttatctggactttcgtagtctgtacccgtccattatcattacccataacgtgtcaccggacacgctgaatcgtgaaggctgcaaagaatatgatgaagccccgcaagtgggtcacaagttctgtaaagactttccgggcttcattccgtcgctgctgggtaacctgctggatgaacgccagaaaatcaagaaacgtatgaaggcaaccattgatccgctggaaaagaaactgctggactatcgtcaacgcgctatcaaaattctggcgaattcttattacggctattacgcgtatgcgcgtgcgcgctggtactgcaaagaatgtgccgaaagtgtgaccgcatggggccgcgaatatattgaaatgtccatccgtgaaatcgaagaaaagtacggtttcaaggttctgtacgcggataccgacggtttccacgcaacgatcccgggtgccgatgcagaaaccgtgaagaaaaaggcgatggaattcctgaagtacatcaacgctaagctgccgggtgcgctggaactggaatatgaaggcttctacaaacgtggctttttcgtgacgaaaaagaaatacgccgttatcgacgaagaaggcaaaattaccacgcgcggtctggaaatcgtgcgccgtgattggagtgaaattgccaaagaaacccaggcaaaagttctggaagcaatcctgaaacatggtaatgtcgaagaagcagtgaaaattgtcaaggaagtgacggaaaaactgtcgaagtatgaaatcccgccggaaaaactggtgatctacgaacaaattacccgcccgctgcatgaatataaagcgattggcccgcacgtggcagttgctaaacgtctggcagcccgcggtgtcaaagtgcgtccgggcatggtgatcggttatattgttctgcgtggcgatggtccgatcagtaaacgcgcgattctggccgaagaatttgatccgcgcaaacacaagtacgacgccgaatattacatcgaaaaccaggtgctgccggctgttctgcgtattctggaagcgttcggctatcgtaaagaagatctgcgctggcagaaaaccaagcaaacgggtctgaccgcatggctgaatgtgaaaaagaaataa

SEQ ID NO: 156 - DNA, 2328 bp, Artificial Sequence
  Synthetic
atgatcctggacaccgattacattaccgaagatggcaagccggttatccgcattttcaagaaagacaacggcgaatttaagattgaatatgatcgcaactttgaaccgtatatttacgcactgctgcgtgatgacagcgctatcgaagatgttaaaaagattaccgcggaacgtcatggccgcgtggttaaggtgaaacgcgccgaaaaagttaaaaagaaatttctgggtcgtccggtggaagtttggaaactgtatttcacgcgtccgcaggatgtgccggcaatccgtgaccgtattcgtgcacacccggcagtcgtggatatctatgaatacgacattccgtttgcaaaacgctacctgatcgataagggcattatcccgatggaaggtgacgaagaactgaaaatgctggcatttgatattgaaaccctgtatcatgaaggcgaagaattcgctgaaggtccgatcctgatgattagctacgccgatgaaaatgaagcacgcgtcatcacctggaagaaaattgatctgccgtttgtggacgttgtctctacggaaaaggaaatgatcaaacgtttcctgaaggtcattaaggaaaaagatccggacgtgctgattacctataacggcgataattttgacttcgcgtacctgaagaaacgctgcgaaaaatttggtatcaagttcacgctgggccgtgatggtagcgacccgaaaattcagcgtatgggcgaccgctttgccgtcgaagtgaaaggtcgtatccacttcgatctgtatccggtcattctgcgcaccgtgaacctgccgacctatacgctggaagctgtttacgaagcgatctttggcaccccgaaggaaaaagtgtatccggaagaaattaccacggcatgggaaacgggcgaaggtctggaacgtgttgcgcgctactcaatggaagatgccaaagtcacctttgaactgggtcgtgaatttttcccgatggaagcgcagctgtcgcgcctggttggccaatcattttgggatgtctcgcgtagctctacgggtaatctggtggaatggttcctgctgcgtaaagcgtatgaacgcaacgaactggcaccgaataaaccgtccggccgcgaatacgatgaacgtcgcggcggttatgcgggcggttacgttaaagaaccggaaaagggtctgtgggaaaacatcgtctacctggattacaagagtctgtatccgtccattatcattacccataacgttagtccggacacgctgaatcgcgaaggctgcaaagaatacgatgtggcgccgcaggttggtcaccgtttttgtaaagactttccgggcttcattccgtccctgctgggtgatctgctggaagaacgtcagaaaatcaagcgcaaaatgaaggccaccattgatccgatcgaacgtcgcctgctggactatcgtcaacgcgcgatcaaaattctggccaacagctattacggctattacggttatgcgcgtgcccgctggtactgcaaagaatgtgcagaaagcgttacggcttggggccgcgaatacatcgaaatgtctatccgtgaaatcgaagaaaagtacggtttcaaggtgctgtacgctgataccgacggcttccatgcgacgattccgggtgaagatgccgaaaccatcaaaaagaaagcaatggaattcctgaagtacatcaactcaaagctgccgggcgccctggaactggaatatgaaggcttctaccgtcgcggctttttcgttacgaagaaaaagtacgcagtcattgacgaagaaggcaaaatcaccacgcgcggtctggaaattgtgcgtcgcgattggagtgaaattgccaaagaaacccaggcacgcgttctggaagcaatcctgcgtcatggtgacgtcgaagaagccgttcgcattgtcaaagatgtgacggaaaagctgtcgaaatatgaagtcccgccggaaaaactggtgatccatgaacaaattacccgtgaactgaaggattacaaagcgacgggcccgcacgttgcaattgctaaacgcctggcagcccgtggcatcaagattcgtccgggtaccgttatcagctatattgtcctgaaaggctctggtcgcatcggtgatcgtgctattccgtttgatgaattcgacccgacgaaacaccgttacgatgccgaatattacatcgaaaatcaggtgctgccggccgttgaacgcattctgaaagcatttggctataagaaagaagaactgcgctaccagaaaacccgtcaagtgggcctgggtgcgtggctgaagctgaaaggtaagaaataa

SEQ ID NO: 157 - DNA, 2322 bp, Artificial Sequence
  Synthetic
atgatcctggacaccgattacattaccgaagatggcaagccggttatccgcattttcaagaaagacaacggcgaatttaagattgaatatgatcgcaactttgaaccgtatatttacgcactgctgcgtgatgacagcgctatcgaagatgttaaaaagattaccgcggaacgtcatggccgcgtggttaaggtgaaacgcgccgaaaaagttaaaaagaaatttctgggtcgtccggtggaagtttggaaactgtatttcacgcgtccgcaggatgtgccggcaatccgtgaccgtattcgtgcacacccggcagtcgtggatatctatgaatacgacattccgtttgcaaaacgctacctgatcgataagggcattatcccgatggaaggtgacgaagaactgaaaatgctggcatttgatattgaaaccctgtatcatgaaggcgaagaattcgctgaaggtccgatcctgatgattagctacgccgatgaaaatgaagcacgcgtcatcacctggaagaaaattgatctgccgtttgtggacgttgtctctacggaaaaggaaatgatcaaacgtttcctgaaggtcattaaggaaaaagatccggacgtgctgattacctataacggcgataattttgacttcgcgtacctgaagaaacgctgcgaaaaatttggtatcaagttcacgctgggccgtgatggtagcgacccgaaaattcagcgtatgggcgaccgctttgccgtcgaagtgaaaggtcgtatccacttcgatctgtatccggtcattctgcgcaccgtgaacctgccgacctatacgctggaagctgtttacgaagcgatctttggcaccccgaaggaaaaagtgtatccggaagaaattaccacggcatgggaaacgggcgaaggtctggaacgtgttgcgcgctactcaatggaagatgccaaagtcacctttgaactgggtcgtgaatttttcccgatggaagcgcagctgtcgcgcctggttggccaatcattttgggatgtctcgcgtagctctacgggtaatctggtggaatggttcctgctgcgtaaagcgtatgaacgcaacgaactggcaccgaataaaccgtccggccgcgaatacgatgaacgtcgcggcggttatgcgggcggttacgttaaagaaccggaaaagggtctgtgggaaaacatcgtctacctggattacaagagtctgtatccgtccattatcattacccataacgttagtccggacacgctgaatcgcgaaggctgcaaagaatacgatgtggcgccgcaggttggtcaccgtttttgtaaagactttccgggcttcattccgtccctgctgggtgatctgctggaagaacgtcagaaaatcaagcgcaaaatgaaggccaccattgatccgatcgaacgtcgcctgctggactatcgtcaacgcgcgatcaaaattctggccaacagctattacggctattacggttatgcgcgtgcccgctggtactgcaaagaatgtgcagaaagcgttacggcttggggccgcgaatacatcgaaatgtctatccgtgaaatcgaagaaaagtacggtttcaaggtgctgtacgctgataccgacggcttccatgcgacgattccgggtgaagatgccgaaaccatcaaaaagaaagcaatggaattcctgaagtacatcaactcaaagctgccgggcgccctggaactggaatatgaaggcttctaccgtcgcggctttttcgttacgaagaaaaagtacgcagtcattgacgaagaaggcaaaatcaccacgcgcggtctggaaattgtgcgtcgcgattggagtgaaattgccaaagaaacccaggcacgtgtcctggaagcaatcctgaaacatggtgatgtggaagaagcggttcgcattgtcaaagaagtgacggaaaagctgtcgaaatatgaagttccgccggaaaaactggtcatccatgaacaaattacccgcgatctgcgtgactacaaagccacgggtccgcacgtggcagttgcaaaacgtctggcagcccgtggcgtgaagattcgtccgggtaccgtgatcagttatattgttctgaaaggctccggtcgcatcggtgaccgtgctattccgtttgatgaattcgacccgacgaaacaccgttacgatgccgaatattacatcgaaaatcaggtcctgccggccgtggaacgcattctgaaagcatttggttatcgcaaggaagatctgcgttaccagaagaccaaacaagtcggcctgggtgcgtggctgaaagtgaaaaagtaa

SEQ ID NO: 158 - DNA, 2328 bp, Artificial Sequence
  Synthetic
atgatcctggacaccgattacattaccgaagatggcaagccggttatccgcattttcaagaaagacaacggcgaatttaagattgaatatgatcgcaactttgaaccgtatatttacgcactgctgcgtgatgacagcgctatcgaagatgttaaaaagattaccgcggaacgtcatggccgcgtggttaaggtgaaacgcgccgaaaaagttaaaaagaaatttctgggtcgtccggtggaagtttggaaactgtatttcacgcgtccgcaggatgtgccggcaatccgtgaccgtattcgtgcacacccggcagtcgtggatatctatgaatacgacattccgtttgcaaaacgctacctgatcgataagggcattatcccgatggaaggtgacgaagaactgaaaatgctggcatttgatattgaaaccctgtatcatgaaggcgaagaattcgctgaaggtccgatcctgatgattagctacgccgatgaaaatgaagcacgcgtcatcacctggaagaaaattgatctgccgtttgtggacgttgtctctacggaaaaggaaatgatcaaacgtttcctgaaggtcattaaggaaaaagatccggacgtgctgattacctataacggcgataattttgacttcgcgtacctgaagaaacgctgcgaaaaatttggtatcaagttcacgctgggccgtgatggtagcgacccgaaaattcagcgtatgggcgaccgctttgccgtcgaagtgaaaggtcgtatccacttcgatctgtatccggtcattctgcgcaccgtgaacctgccgacctatacgctggaagctgtttacgaagcgatctttggcaccccgaaggaaaaagtgtatccggaagaaattaccacggcatgggaaacgggcgaaggtctggaacgtgttgcgcgctactcaatggaagatgccaaagtcacctttgaactgggtcgtgaatttttcccgatggaagcgcagctgtcgcgcctggttggccaatcattttgggatgtctcgcgtagctctacgggtaatctggtggaatggttcctgctgcgtaaagcgtatgaacgcaacgaactggcaccgaataaaccgtccggccgcgaatacgatgaacgtcgcggcggttatgcgggcggttacgttaaagaaccggaaaagggtctgtgggaaaacatcgtctacctggattacaagagtctgtatccgtccattatcattacccataacgttagtccggacacgctgaatcgcgaaggctgcaaagaatacgatgtggcgccgcaggttggtcaccgtttttgtaaagactttccgggcttcattccgtccctgctgggtgatctgctggaagaacgtcagaaaatcaagcgcaaaatgaaggccaccattgatccgatcgaacgtcgcctgctggactatcgtcaacgcgcgatcaaaattctggccaacagctattacggctattacggttatgcgcgtgcccgctggtactgcaaagaatgtgcagaaagcgttacggcttggggccgcgaatacatcgaaatgtctatccgtgaaatcgaagaaaagtacggtttcaaggtgctgtacgctgataccgacggcttccatgcgacgattccgggtgaagatgccgaaaccatcaaaaagaaagcaatggaattcctgaagtacatcaactcaaagctgccgggcgccctggaactggaatatgaaggcttctaccgtcgcggctttttcgttacgaagaaaaagtacgcagtcattgacgaagaaggcaaaatcaccacgcgcggtctggaaattgtgcgtcgcgattggagtgaaattgccaaagaaacccaggcacgtgtgctggaagctctgctgaaagatggcaatgttgaagaagcggtttccattgtcaaagaagtgacggaaaagctgggtaaatatgaagtcccgccggaaaaactggtgatccatgaacaaattacccgcgaactgaaggattacaaagcgacgggcccgcacgttgctatcgcgaaacgtctggcagcgcgtggcgtgaagattcgtccgggtaccgttatcagctatattgtcctgaaaggctctggtcgtatcggtgaccgcgcgattccgtttgatgaattcgacccgacgaaacatcgctacgatgcagaatattacatcgaaaaccaggttctgccggctgtcgaacgtattctgaaagcgtttggctatcgtgccgaagatctgcgctaccagaaaacccgtcaagtgggcctgggtgtttggctgcaaccgaaaggtaagaaataa

SEQ ID NO: 159 - DNA, 2325 bp, Artificial Sequence
  Synthetic
atgatcctggacaccgattacattaccgaagatggcaagccggttatccgcattttcaagaaagacaacggcgaatttaagattgaatatgatcgcaactttgaaccgtatatttacgcactgctgcgtgatgacagcgctatcgaagatgttaaaaagattaccgcggaacgtcatggccgcgtggttaaggtgaaacgcgccgaaaaagttaaaaagaaatttctgggtcgtccggtggaagtttggaaactgtatttcacgcgtccgcaggatgtgccggcaatccgtgaccgtattcgtgcacacccggcagtcgtggatatctatgaatacgacattccgtttgcaaaacgctacctgatcgataagggcattatcccgatggaaggtgacgaagaactgaaaatgctggcatttgatattgaaaccctgtatcatgaaggcgaagaattcgctgaaggtccgatcctgatgattagctacgccgatgaaaatgaagcacgcgtcatcacctggaagaaaattgatctgccgtttgtggacgttgtctctacggaaaaggaaatgatcaaacgtttcctgaaggtcattaaggaaaaagatccggacgtgctgattacctataacggcgataattttgacttcgcgtacctgaagaaacgctgcgaaaaatttggtatcaagttcacgctgggccgtgatggtagcgacccgaaaattcagcgtatgggcgaccgctttgccgtcgaagtgaaaggtcgtatccacttcgatctgtatccggtcattctgcgcaccgtgaacctgccgacctatacgctggaagctgtttacgaagcgatctttggcaccccgaaggaaaaagtgtatccggaagaaattaccacggcatgggaaacgggcgaaggtctggaacgtgttgcgcgctactcaatggaagatgccaaagtcacctttgaactgggtcgtgaatttttcccgatggaagcgcagctgtcgcgcctggttggccaatcattttgggatgtctcgcgtagctctacgggtaatctggtggaatggttcctgctgcgtaaagcgtatgaacgcaacgaactggcaccgaataaaccgtccggccgcgaatacgatgaacgtcgcggcggttatgcgggcggttacgttaaagaaccggaaaagggtctgtgggaaaacatcgtctacctggattacaagagtctgtatccgtccattatcattacccataacgttagtccggacacgctgaatcgcgaaggctgcaaagaatacgatgtggcgccgcaggttggtcaccgtttttgtaaagactttccgggcttcattccgtccctgctgggtgatctgctggaagaacgtcagaaaatcaagcgcaaaatgaaggccaccattgatccgatcgaacgtcgcctgctggactatcgtcaacgcgcgatcaaaattctggccaacagctattacggctattacggttatgcgcgtgcccgctggtactgcaaagaatgtgcagaaagcgttacggcttggggccgcgaatacatcgaaatgtctatccgtgaaatcgaagaaaagtacggtttcaaggtgctgtacgctgataccgacggcttccatgcgacgattccgggtgaagatgccgaaaccatcaaaaagaaagcaatggaattcctgaagtacatcaactcaaagctgccgggcgccctggaactggaatatgaaggcttctaccgtcgcggctttttcgttacgaagaaaaagtacgcagtcattgacgaagaaggcaaaatcaccacgcgcggtctggaaattgtgcgtcgcgattggagtgaaattgccaaagaaacccaggcaaaggttctggaagcaattctgaaacatggtaacgtcgaagaagcggtcaagatcgtgaaagaagttaccgaaaaactgtcgaattatgaaattccggtcgaaaagctggtgatctacgaacaaattacgcgcccgctgaacgaatataaagccattggcccgcacgtggcagttgctaaacgtctggcggccaagggtatcaagattaaaccgggcatggtgattggttatgttgtcctgcgcggcgatggtccgatcagcaaacgtgcgatcgccatcgaagaattcgatggcaaaaagcataagtacgacgcagaatactacatcgaaaatcaggttctgccggccgtcgaacgtatcctgaaagcattcggttataagcgtgaagatctgcgctggcagaagaccaaacaagtgggcctgggtgcgtggctgaaagttaaaaagtcttaa

SEQ ID NO: 160 - DNA, 2328 bp, Artificial Sequence
  Synthetic
atgatcctggacaccgattacattaccgaagatggcaagccggttatccgcattttcaagaaagacaacggcgaatttaagattgaatatgatcgcaactttgaaccgtatatttacgcactgctgcgtgatgacagcgctatcgaagatgttaaaaagattaccgcggaacgtcatggccgcgtggttaaggtgaaacgcgccgaaaaagttaaaaagaaatttctgggtcgtccggtggaagtttggaaactgtatttcacgcgtccgcaggatgtgccggcaatccgtgaccgtattcgtgcacacccggcagtcgtggatatctatgaatacgacattccgtttgcaaaacgctacctgatcgataagggcattatcccgatggaaggtgacgaagaactgaaaatgctggcatttgatattgaaaccctgtatcatgaaggcgaagaattcgctgaaggtccgatcctgatgattagctacgccgatgaaaatgaagcacgcgtcatcacctggaagaaaattgatctgccgtttgtggacgttgtctctacggaaaaggaaatgatcaaacgtttcctgaaggtcattaaggaaaaagatccggacgtgctgattacctataacggcgataattttgacttcgcgtacctgaagaaacgctgcgaaaaatttggtatcaagttcacgctgggccgtgatggtagcgacccgaaaattcagcgtatgggcgaccgctttgccgtcgaagtgaaaggtcgtatccacttcgatctgtatccggtcattctgcgcaccgtgaacctgccgacctatacgctggaagctgtttacgaagcgatctttggcaccccgaaggaaaaagtgtatccggaagaaattaccacggcatgggaaacgggcgaaggtctggaacgtgttgcgcgctactcaatggaagatgccaaagtcacctttgaactgggtcgtgaatttttcccgatggaagcgcagctgtcgcgcctggttggccaatcattttgggatgtctcgcgtagctctacgggtaatctggtggaatggttcctgctgcgtaaagcgtatgaacgcaacgaactggcaccgaataaaccgtccggccgcgaatacgatgaacgtcgcggcggttatgcgggcggttacgttaaagaaccggaaaagggtctgtgggaaaacatcgtctacctggattacaagagtctgtatccgtccattatcattacccataacgttagtccggacacgctgaatcgcgaaggctgcaaagaatacgatgtggcgccgcaggttggtcaccgtttttgtaaagactttccgggcttcattccgtccctgctgggtgatctgctggaagaacgtcagaaaatcaagcgcaaaatgaaggccaccattgatccgatcgaacgtcgcctgctggactatcgtcaacgcgcgatcaaaattctggccaacagctattacggctattacggttatgcgcgtgcccgctggtactgcaaagaatgtgcagaaagcgttacggcttggggccgcgaatacatcgaaatgtctatccgtgaaatcgaagaaaagtacggtttcaaggtgctgtacgctgataccgacggcttccatgcgacgattccgggtgaagatgccgaaaccatcaaaaagaaagcaatggaattcctgaagtacatcaactcaaagctgccgggcgccctggaactggaatatgaaggcttctaccgtcgcggctttttcgttacgaagaaaaagtacgcagtcattgacgaagaaggcaaaatcaccacgcgcggtctggaaattgtgcgtcgcgattggagtgaaattgccaaagaaacccaggcacgtgttctggaagcactgctgaaagatggtaatgtcgaagaagcagtgagtattgttaaagaagtcacggaaaaactgtccaagtatgaagtcccgccggaaaaactggtgattcatgaacaaatcacccgcgaactgaaagattacaaggcgacgggcccgcacgtggcaattgctaaacgtctggcagcgcgtggcgttaagatccgtccgggtaccgttattagctatatcgtcctgaaaggctctggtcgtattggtgaccgcgccatcccgtttgatgaattcgacccggctaaacaccgctacgatgcggaatattacattgaaaatcaggtcctgccggctgtggaacgtatcctgaaagcgtttggctatcgtaaggaagatctgcgctaccagaaaacccgtcaagtgggcctgggtgcgtggctgaaaccgaagggtaaaaagtaa

SEQ ID NO: 161 - DNA, 2328 bp, Artificial Sequence
  Synthetic
atgatcctggacaccgattacattaccgaagatggcaagccggttatccgcattttcaagaaagacaacggcgaatttaagattgaatatgatcgcaactttgaaccgtatatttacgcactgctgcgtgatgacagcgctatcgaagatgttaaaaagattaccgcggaacgtcatggccgcgtggttaaggtgaaacgcgccgaaaaagttaaaaagaaatttctgggtcgtccggtggaagtttggaaactgtatttcacgcgtccgcaggatgtgccggcaatccgtgaccgtattcgtgcacacccggcagtcgtggatatctatgaatacgacattccgtttgcaaaacgctacctgatcgataagggcattatcccgatggaaggtgacgaagaactgaaaatgctggcatttgatattgaaaccctgtatcatgaaggcgaagaattcgctgaaggtccgatcctgatgattagctacgccgatgaaaatgaagcacgcgtcatcacctggaagaaaattgatctgccgtttgtggacgttgtctctacggaaaaggaaatgatcaaacgtttcctgaaggtcattaaggaaaaagatccggacgtgctgattacctataacggcgataattttgacttcgcgtacctgaagaaacgctgcgaaaaatttggtatcaagttcacgctgggccgtgatggtagcgacccgaaaattcagcgtatgggcgaccgctttgccgtcgaagtgaaaggtcgtatccacttcgatctgtatccggtcattctgcgcaccgtgaacctgccgacctatacgctggaagctgtttacgaagcgatctttggcaccccgaaggaaaaagtgtatccggaagaaattaccacggcatgggaaacgggcgaaggtctggaacgtgttgcgcgctactcaatggaagatgccaaagtcacctttgaactgggtcgtgaatttttcccgatggaagcgcagctgtcgcgcctggttggccaatcattttgggatgtctcgcgtagctctacgggtaatctggtggaatggttcctgctgcgtaaagcgtatgaacgcaacgaactggcaccgaataaaccgtccggccgcgaatacgatgaacgtcgcggcggttatgcgggcggttacgttaaagaaccggaaaagggtctgtgggaaaacatcgtctacctggattacaagagtctgtatccgtccattatcattacccataacgttagtccggacacgctgaatcgcgaaggctgcaaagaatacgatgtggcgccgcaggttggtcaccgtttttgtaaagactttccgggcttcattccgtccctgctgggtgatctgctggaagaacgtcagaaaatcaagcgcaaaatgaaggccaccattgatccgatcgaacgtcgcctgctggactatcgtcaacgcgcgatcaaaattctggccaacagctattacggctattacggttatgcgcgtgcccgctggtactgcaaagaatgtgcagaaagcgttacggcttggggccgcgaatacatcgaaatgtctatccgtgaaatcgaagaaaagtacggtttcaaggtgctgtacgctgataccgacggcttccatgcgacgattccgggtgaagatgccgaaaccatcaaaaagaaagcaatggaattcctgaagtacatcaactcaaagctgccgggcgccctggaactggaatatgaaggcttctaccgtcgcggctttttcgttacgaagaaaaagtacgcagtcattgacgaagaaggcaaaatcaccacgcgcggtctggaaattgtgcgtcgcgattggagtgaaattgccaaagaaacccaggcacgcgtcctggaagcaatcctgaaagatggtgacgtggaagaagccgtccgtattgtgaaagaagttacggaaaaactgtccaaatatgaagttccgccggaaaaactggtcatccatgaacaaattacccgcgaactgaaagattacaaagcgacgggcccgcacgtcgcaatcgctaaacgtctggcggcgcgtggcgtgaaaattcgtccgggtaccgtgatctcatatattgttctgaaaggctcgggtcgtatcggtgaccgcgctattccgtttgatgaattcgacccgaaaaaacacaaatacgatgcggaatactacatcgaaaaccaggttctgccggccgtcgaacgtattctgcgcgcatttggctaccgtaaagaagatctgcgttatcaaaaaaccaaacaagtgggtctgggtgcgtggctgaaaccgaaaggtaaaaaataa

SEQ ID NO: 162 - DNA, 2325 bp, Artificial Sequence
  Synthetic
atgatcctggacaccgattacattaccgaagatggcaagccggttatccgcattttcaagaaagacaacggcgaatttaagattgaatatgatcgcaactttgaaccgtatatttacgcactgctgcgtgatgacagcgctatcgaagatgttaaaaagattaccgcggaacgtcatggccgcgtggttaaggtgaaacgcgccgaaaaagttaaaaagaaatttctgggtcgtccggtggaagtttggaaactgtatttcacgcgtccgcaggatgtgccggcaatccgtgaccgtattcgtgcacacccggcagtcgtggatatctatgaatacgacattccgtttgcaaaacgctacctgatcgataagggcattatcccgatggaaggtgacgaagaactgaaaatgctggcatttgatattgaaaccctgtatcatgaaggcgaagaattcgctgaaggtccgatcctgatgattagctacgccgatgaaaatgaagcacgcgtcatcacctggaagaaaattgatctgccgtttgtggacgttgtctctacggaaaaggaaatgatcaaacgtttcctgaaggtcattaaggaaaaagatccggacgtgctgattacctataacggcgataattttgacttcgcgtacctgaagaaacgctgcgaaaaatttggtatcaagttcacgctgggccgtgatggtagcgacccgaaaattcagcgtatgggcgaccgctttgccgtcgaagtgaaaggtcgtatccacttcgatctgtatccggtcattctgcgcaccgtgaacctgccgacctatacgctggaagctgtttacgaagcgatctttggcaccccgaaggaaaaagtgtatccggaagaaattaccacggcatgggaaacgggcgaaggtctggaacgtgttgcgcgctactcaatggaagatgccaaagtcacctttgaactgggtcgtgaatttttcccgatggaagcgcagctgtcgcgcctggttggccaatcattttgggatgtctcgcgtagctctacgggtaatctggtggaatggttcctgctgcgtaaagcgtatgaacgcaacgaactggcaccgaataaaccgtccggccgcgaatacgatgaacgtcgcggcggttatgcgggcggttacgttaaagaaccggaaaagggtctgtgggaaaacatcgtctacctggattacaagagtctgtatccgtccattatcattacccataacgttagtccggacacgctgaatcgcgaaggctgcaaagaatacgatgtggcgccgcaggttggtcaccgtttttgtaaagactttccgggcttcattccgtccctgctgggtgatctgctggaagaacgtcagaaaatcaagcgcaaaatgaaggccaccattgatccgatcgaacgtcgcctgctggactatcgtcaacgcgcgatcaaaattctggccaacagctattacggctattacggttatgcgcgtgcccgctggtactgcaaagaatgtgcagaaagcgttacggcttggggccgcgaatacatcgaaatgtctatccgtgaaatcgaagaaaagtacggtttcaaggtgctgtacgctgataccgacggcttccatgcgacgattccgggtgaagatgccgaaaccatcaaaaagaaagcaatggaattcctgaagtacatcaactcaaagctgccgggcgccctggaactggaatatgaaggcttctaccgtcgcggctttttcgttacgaagaaaaagtacgcagtcattgacgaagaaggcaaaatcaccacgcgcggtctggaaattgtgcgtcgcgattggagtgaaattgccaaagaaacccaggcacgtgttctggaagcaattctgaaacatggtaacgtcgaagaagcggtcaaaatcgtgaaagaagttacggaaaaactgtctaactacgaaattccgccggaaaaactggccatctacgaacaaattacccgcccgctgcatgaatataaagcaatcggtccgcacgtcgcagtggcaaaacgtctggcagcacgcggcgttaaagtcaaaccgggtatggtcatcggctatattgtgctgcgtggtgatggcccgatcagcaaccgcgcaattctggctgaagaatacgatctgaaaaaacacaaatacgacgccgaatattacatcgaaaatcaggttctgccggctgtcctgcgtattctggaagcgtttggctatcgtaaagaagatctgcgctggcagaaaacccgtcaaacgggtctgacctcatggctgaatattaaaaaatcgtaa

SEQ ID NO: 163 - DNA, 2325 bp, Artificial Sequence
  Synthetic
atgatcctggacaccgattacattaccgaagatggcaagccggttatccgcattttcaagaaagacaacggcgaatttaagattgaatatgatcgcaactttgaaccgtatatttacgcactgctgcgtgatgacagcgctatcgaagatgttaaaaagattaccgcggaacgtcatggccgcgtggttaaggtgaaacgcgccgaaaaagttaaaaagaaatttctgggtcgtccggtggaagtttggaaactgtatttcacgcgtccgcaggatgtgccggcaatccgtgaccgtattcgtgcacacccggcagtcgtggatatctatgaatacgacattccgtttgcaaaacgctacctgatcgataagggcattatcccgatggaaggtgacgaagaactgaaaatgctggcatttgatattgaaaccctgtatcatgaaggcgaagaattcgctgaaggtccgatcctgatgattagctacgccgatgaaaatgaagcacgcgtcatcacctggaagaaaattgatctgccgtttgtggacgttgtctctacggaaaaggaaatgatcaaacgtttcctgaaggtcattaaggaaaaagatccggacgtgctgattacctataacggcgataattttgacttcgcgtacctgaagaaacgctgcgaaaaatttggtatcaagttcacgctgggccgtgatggtagcgacccgaaaattcagcgtatgggcgaccgctttgccgtcgaagtgaaaggtcgtatccacttcgatctgtatccggtcattctgcgcaccgtgaacctgccgacctatacgctggaagctgtttacgaagcgatctttggcaccccgaaggaaaaagtgtatccggaagaaattaccacggcatgggaaacgggcgaaggtctggaacgtgttgcgcgctactcaatggaagatgccaaagtcacctttgaactgggtcgtgaatttttcccgatggaagcgcagctgtcgcgcctggttggccaatcattttgggatgtctcgcgtagctctacgggtaatctggtggaatggttcctgctgcgtaaagcgtatgaacgcaacgaactggcaccgaataaaccgtccggccgcgaatacgatgaacgtcgcggcggttatgcgggcggttacgttaaagaaccggaaaagggtctgtgggaaaacatcgtctacctggattacaagagtctgtatccgtccattatcattacccataacgttagtccggacacgctgaatcgcgaaggctgcaaagaatacgatgtggcgccgcaggttggtcaccgtttttgtaaagactttccgggcttcattccgtccctgctgggtgatctgctggaagaacgtcagaaaatcaagcgcaaaatgaaggccaccattgatccgatcgaacgtcgcctgctggactatcgtcaacgcgcgatcaaaattctggccaacagctattacggctattacggttatgcgcgtgcccgctggtactgcaaagaatgtgcagaaagcgttacggcttggggccgcgaatacatcgaaatgtctatccgtgaaatcgaagaaaagtacggtttcaaggtgctgtacgctgataccgacggcttccatgcgacgattccgggtgaagatgccgaaaccatcaaaaagaaagcaatggaattcctgaagtacatcaactcaaagctgccgggcgccctggaactggaatatgaaggcttctaccgtcgcggctttttcgttacgaagaaaaagtacgcagtcattgacgaagaaggcaaaatcaccacgcgcggtctggaaattgtgcgtcgcgattggagtgaaattgccaaagaaacccaggcaaaagttctggaagcaatcctgaaacatggtaatgtcgaagaagcagtgaaaattgtcaaggaagtgacggaaaaactgtcgaagtatgaaatcccgccggaaaaactggtgatctacgaacaaattacccgcccgctgcatgaatataaagcgattggcccgcacgtggcagttgctaaacgtctggcagcccgcggtgtcaaagtgcgtccgggcatggtgatcggttatattgttctgcgtggcgatggtccgatcagtaaacgcgcgattctggccgaagaatttgatccgcgcaaacacaagtacgacgccgaatattacatcgaaaaccaggtgctgccggctgttctgcgtattctggaagcgttcggctatcgtaaagaagatctgcgctggcagaaaaccaagcaaacgggtctgaccgcatggctgaatgtgaaaaagaaataa

SEQ ID NO: 164 - DNA, 2331 bp, Artificial Sequence
  Synthetic
atgatcctggacaccgattacattaccgaagatggcaagccggttatccgcattttcaagaaagacaacggcgaatttaagattgaatatgatcgcaactttgaaccgtatatttacgcactgctgcgtgatgacagcgctatcgaagatgttaaaaagattaccgcggaacgtcatggccgcgtggttaaggtgaaacgcgccgaaaaagttaaaaagaaatttctgggtcgtccggtggaagtttggaaactgtatttcacgcgtccgcaggatgtgccggcaatccgtgaccgtattcgtgcacacccggcagtcgtggatatctatgaatacgacattccgtttgcaaaacgctacctgatcgataagggcattatcccgatggaaggtgacgaagaactgaaaatgctggcatttgatattgaaaccctgtatcatgaaggcgaagaattcgctgaaggtccgatcctgatgattagctacgccgatgaaaatgaagcacgcgtcatcacctggaagaaaattgatctgccgtttgtggacgttgtctctacggaaaaggaaatgatcaaacgtttcctgaaggtcattaaggaaaaagatccggacgtgctgattacctataacggcgataattttgacttcgcgtacctgaagaaacgctgcgaaaaatttggtatcaagttcacgctgggccgtgatggtagcgacccgaaaattcagcgtatgggcgaccgctttgccgtcgaagtgaaaggtcgtatccacttcgatctgtatccggtcattctgcgcaccgtgaacctgccgacctatacgctggaagctgtttacgaagcgatctttggcaccccgaaggaaaaagtgtatccggaagaaattaccacggcatgggaaacgggcgaaggtctggaacgtgttgcgcgctactcaatggaagatgccaaagtcacctttgaactgggtcgtgaatttttcccgatggaagcgcagctgtcgcgcctggttggccaatcattttgggatgtctcgcgtagctctacgggtaatctggtggaatggttcctgctgcgtaaagcgtatgaacgcaacgaactggcgccgaataaaccggatgaacgcgaatatgaacgtcgcctgcgtgaaagttatgaaggcggttacgttaaagaaccggaacgcggcctgtgggaaggtattgtgtcactggattttcgtagtctgtacccgtccattatcattacccataacgtttcgccggatacgctgaataaagaaggctgcggtgaatatgacgaagccccggaagtgggtcaccgcttctgtaaagattttccgggcttcattccgtcactgctgggttcgctgctggaagaacgccagaagatcaagaaacgtatgaaggaatctaaggatccggtggaacgcaaactgctggactatcgtcaacgcgcgatcaagattctggccaacagcttttatggctattacggttacgcgaaagcccgttggtactgcaaggaatgtgcagaaagcgtgaccgcttggggccgccagtatattgaactggtccgtcgcgaactggaagaacgtggttttaaagtgctgtatatcgataccgacggcctgtacgccacgattccgggtgaaaagaactgggaagaaatcaagcgtcgcgcactggaatttgttaactacatcaattccaaactgccgggcattctggaactggaatatgaaggcttctacacccgtggctttttcgtgacgaagaaaaagtatgcgctgatcgatgaagaaggcaaaattgtcacccgtggtctggaaatcgtgcgtcgcgattggagtgaaattgccaaagaaacccaggcacgcgttctggaagcaatcctgcgtcatggtgacgtcgaagaagccgttcgcattgtcaaagatgtgacggaaaagctgtcgaaatatgaagtcccgccggaaaaactggtgatccatgaacaaattacccgtgaactgaaggattacaaagcgacgggcccgcacgttgcaattgctaaacgcctggcagcccgtggcatcaagattcgtccgggtaccgttatcagctatattgtcctgaaaggctctggtcgcatcggtgatcgtgctattccgtttgatgaattcgacccgacgaaacaccgttacgatgccgaatattacatcgaaaatcaggtgctgccggccgttgaacgcattctgaaagcatttggctataagaaagaagaactgcgctaccagaaaacccgtcaagtgggcctgggtgcgtggctgaagctgaaaggtaagaaataa

SEQ ID NO: 165 - DNA, 2325 bp, Artificial Sequence
  Synthetic
atgatcctggacaccgattacattaccgaagatggcaagccggttatccgcattttcaagaaagacaacggcgaatttaagattgaatatgatcgcaactttgaaccgtatatttacgcactgctgcgtgatgacagcgctatcgaagatgttaaaaagattaccgcggaacgtcatggccgcgtggttaaggtgaaacgcgccgaaaaagttaaaaagaaatttctgggtcgtccggtggaagtttggaaactgtatttcacgcgtccgcaggatgtgccggcaatccgtgaccgtattcgtgcacacccggcagtcgtggatatctatgaatacgacattccgtttgcaaaacgctacctgatcgataagggcattatcccgatggaaggtgacgaagaactgaaaatgctggcatttgatattgaaaccctgtatcatgaaggcgaagaattcgctgaaggtccgatcctgatgattagctacgccgatgaaaatgaagcacgcgtcatcacctggaagaaaattgatctgccgtttgtggacgttgtctctacggaaaaggaaatgatcaaacgtttcctgaaggtcattaaggaaaaagatccggacgtgctgattacctataacggcgataattttgacttcgcgtacctgaagaaacgctgcgaaaaatttggtatcaagttcacgctgggccgtgatggtagcgacccgaaaattcagcgtatgggcgaccgctttgccgtcgaagtgaaaggtcgtatccacttcgatctgtatccggtcattctgcgcaccgtgaacctgccgacctatacgctggaagctgtttacgaagcgatctttggcaccccgaaggaaaaagtgtatccggaagaaattaccacggcatgggaaacgggcgaaggtctggaacgtgttgcgcgctactcaatggaagatgccaaagtcacctttgaactgggtcgtgaatttttcccgatggaagcgcagctgtcgcgcctggttggccaatcattttgggatgtctcgcgtagctctacgggtaatctggtggaatggttcctgctgcgtaaagcgtatgaacgcaacgaactggcgccgaataaaccggatgaacgcgaatatgaacgtcgcctgcgtgaaagttatgaaggcggttacgttaaagaaccggaacgcggcctgtgggaaggtattgtgtcactggattttcgtagtctgtacccgtccattatcattacccataacgtttcgccggatacgctgaataaagaaggctgcggtgaatatgacgaagccccggaagtgggtcaccgcttctgtaaagattttccgggcttcattccgtcactgctgggttcgctgctggaagaacgccagaagatcaagaaacgtatgaaggaatctaaggatccggtggaacgcaaactgctggactatcgtcaacgcgcgatcaagattctggccaacagcttttatggctattacggttacgcgaaagcccgttggtactgcaaggaatgtgcagaaagcgtgaccgcttggggccgccagtatattgaactggtccgtcgcgaactggaagaacgtggttttaaagtgctgtatatcgataccgacggcctgtacgccacgattccgggtgaaaagaactgggaagaaatcaagcgtcgcgcactggaatttgttaactacatcaattccaaactgccgggcattctggaactggaatatgaaggcttctacacccgtggctttttcgtgacgaagaaaaagtatgcgctgatcgatgaagaaggcaaaattgtcacccgtggtctggaaatcgtgcgtcgcgattggagtgaaattgccaaagaaacccaggcacgtgtcctggaagcaatcctgaaacatggtgatgtggaagaagcggttcgcattgtcaaagaagtgacggaaaagctgtcgaaatatgaagttccgccggaaaaactggtcatccatgaacaaattacccgcgatctgcgtgactacaaagccacgggtccgcacgtggcagttgcaaaacgtctggcagcccgtggcgtgaagattcgtccgggtaccgtgatcagttatattgttctgaaaggctccggtcgcatcggtgaccgtgctattccgtttgatgaattcgacccgacgaaacaccgttacgatgccgaatattacatcgaaaatcaggtcctgccggccgtggaacgcattctgaaagcatttggttatcgcaaggaagatctgcgttaccagaagaccaaacaagtcggcctgggtgcgtggctgaaagtgaaaaagtaa

SEQ ID NO: 166 - DNA, 2331 bp, Artificial Sequence
  Synthetic
atgatcctggacaccgattacattaccgaagatggcaagccggttatccgcattttcaagaaagacaacggcgaatttaagattgaatatgatcgcaactttgaaccgtatatttacgcactgctgcgtgatgacagcgctatcgaagatgttaaaaagattaccgcggaacgtcatggccgcgtggttaaggtgaaacgcgccgaaaaagttaaaaagaaatttctgggtcgtccggtggaagtttggaaactgtatttcacgcgtccgcaggatgtgccggcaatccgtgaccgtattcgtgcacacccggcagtcgtggatatctatgaatacgacattccgtttgcaaaacgctacctgatcgataagggcattatcccgatggaaggtgacgaagaactgaaaatgctggcatttgatattgaaaccctgtatcatgaaggcgaagaattcgctgaaggtccgatcctgatgattagctacgccgatgaaaatgaagcacgcgtcatcacctggaagaaaattgatctgccgtttgtggacgttgtctctacggaaaaggaaatgatcaaacgtttcctgaaggtcattaaggaaaaagatccggacgtgctgattacctataacggcgataattttgacttcgcgtacctgaagaaacgctgcgaaaaatttggtatcaagttcacgctgggccgtgatggtagcgacccgaaaattcagcgtatgggcgaccgctttgccgtcgaagtgaaaggtcgtatccacttcgatctgtatccggtcattctgcgcaccgtgaacctgccgacctatacgctggaagctgtttacgaagcgatctttggcaccccgaaggaaaaagtgtatccggaagaaattaccacggcatgggaaacgggcgaaggtctggaacgtgttgcgcgctactcaatggaagatgccaaagtcacctttgaactgggtcgtgaatttttcccgatggaagcgcagctgtcgcgcctggttggccaatcattttgggatgtctcgcgtagctctacgggtaatctggtggaatggttcctgctgcgtaaagcgtatgaacgcaacgaactggcgccgaataaaccggatgaacgcgaatatgaacgtcgcctgcgtgaaagttatgaaggcggttacgttaaagaaccggaacgcggcctgtgggaaggtattgtgtcactggattttcgtagtctgtacccgtccattatcattacccataacgtttcgccggatacgctgaataaagaaggctgcggtgaatatgacgaagccccggaagtgggtcaccgcttctgtaaagattttccgggcttcattccgtcactgctgggttcgctgctggaagaacgccagaagatcaagaaacgtatgaaggaatctaaggatccggtggaacgcaaactgctggactatcgtcaacgcgcgatcaagattctggccaacagcttttatggctattacggttacgcgaaagcccgttggtactgcaaggaatgtgcagaaagcgtgaccgcttggggccgccagtatattgaactggtccgtcgcgaactggaagaacgtggttttaaagtgctgtatatcgataccgacggcctgtacgccacgattccgggtgaaaagaactgggaagaaatcaagcgtcgcgcactggaatttgttaactacatcaattccaaactgccgggcattctggaactggaatatgaaggcttctacacccgtggctttttcgtgacgaagaaaaagtatgcgctgatcgatgaagaaggcaaaattgtcacccgtggtctggaaatcgtgcgtcgcgattggagtgaaattgccaaagaaacccaggcacgtgtgctggaagctctgctgaaagatggcaatgttgaagaagcggtttccattgtcaaagaagtgacggaaaagctgggtaaatatgaagtcccgccggaaaaactggtgatccatgaacaaattacccgcgaactgaaggattacaaagcgacgggcccgcacgttgctatcgcgaaacgtctggcagcgcgtggcgtgaagattcgtccgggtaccgttatcagctatattgtcctgaaaggctctggtcgtatcggtgaccgcgcgattccgtttgatgaattcgacccgacgaaacatcgctacgatgcagaatattacatcgaaaaccaggttctgccggctgtcgaacgtattctgaaagcgtttggctatcgtgccgaagatctgcgctaccagaaaacccgtcaagtgggcctgggtgtttggctgcaaccgaaaggtaagaaataa

SEQ ID NO: 167 - DNA, 2328 bp, Artificial Sequence
  Synthetic
atgatcctggacaccgattacattaccgaagatggcaagccggttatccgcattttcaagaaagacaacggcgaatttaagattgaatatgatcgcaactttgaaccgtatatttacgcactgctgcgtgatgacagcgctatcgaagatgttaaaaagattaccgcggaacgtcatggccgcgtggttaaggtgaaacgcgccgaaaaagttaaaaagaaatttctgggtcgtccggtggaagtttggaaactgtatttcacgcgtccgcaggatgtgccggcaatccgtgaccgtattcgtgcacacccggcagtcgtggatatctatgaatacgacattccgtttgcaaaacgctacctgatcgataagggcattatcccgatggaaggtgacgaagaactgaaaatgctggcatttgatattgaaaccctgtatcatgaaggcgaagaattcgctgaaggtccgatcctgatgattagctacgccgatgaaaatgaagcacgcgtcatcacctggaagaaaattgatctgccgtttgtggacgttgtctctacggaaaaggaaatgatcaaacgtttcctgaaggtcattaaggaaaaagatccggacgtgctgattacctataacggcgataattttgacttcgcgtacctgaagaaacgctgcgaaaaatttggtatcaagttcacgctgggccgtgatggtagcgacccgaaaattcagcgtatgggcgaccgctttgccgtcgaagtgaaaggtcgtatccacttcgatctgtatccggtcattctgcgcaccgtgaacctgccgacctatacgctggaagctgtttacgaagcgatctttggcaccccgaaggaaaaagtgtatccggaagaaattaccacggcatgggaaacgggcgaaggtctggaacgtgttgcgcgctactcaatggaagatgccaaagtcacctttgaactgggtcgtgaatttttcccgatggaagcgcagctgtcgcgcctggttggccaatcattttgggatgtctcgcgtagctctacgggtaatctggtggaatggttcctgctgcgtaaagcgtatgaacgcaacgaactggcgccgaataaaccggatgaacgcgaatatgaacgtcgcctgcgtgaaagttatgaaggcggttacgttaaagaaccggaacgcggcctgtgggaaggtattgtgtcactggattttcgtagtctgtacccgtccattatcattacccataacgtttcgccggatacgctgaataaagaaggctgcggtgaatatgacgaagccccggaagtgggtcaccgcttctgtaaagattttccgggcttcattccgtcactgctgggttcgctgctggaagaacgccagaagatcaagaaacgtatgaaggaatctaaggatccggtggaacgcaaactgctggactatcgtcaacgcgcgatcaagattctggccaacagcttttatggctattacggttacgcgaaagcccgttggtactgcaaggaatgtgcagaaagcgtgaccgcttggggccgccagtatattgaactggtccgtcgcgaactggaagaacgtggttttaaagtgctgtatatcgataccgacggcctgtacgccacgattccgggtgaaaagaactgggaagaaatcaagcgtcgcgcactggaatttgttaactacatcaattccaaactgccgggcattctggaactggaatatgaaggcttctacacccgtggctttttcgtgacgaagaaaaagtatgcgctgatcgatgaagaaggcaaaattgtcacccgtggtctggaaatcgtgcgtcgcgattggagtgaaattgccaaagaaacccaggcaaaggttctggaagcaattctgaaacatggtaacgtcgaagaagcggtcaagatcgtgaaagaagttaccgaaaaactgtcgaattatgaaattccggtcgaaaagctggtgatctacgaacaaattacgcgcccgctgaacgaatataaagccattggcccgcacgtggcagttgctaaacgtctggcggccaagggtatcaagattaaaccgggcatggtgattggttatgttgtcctgcgcggcgatggtccgatcagcaaacgtgcgatcgccatcgaagaattcgatggcaaaaagcataagtacgacgcagaatactacatcgaaaatcaggttctgccggccgtcgaacgtatcctgaaagcattcggttataagcgtgaagatctgcgctggcagaagaccaaacaagtgggcctgggtgcgtggctgaaagttaaaaagtcttaa

SEQ ID NO: 168 - DNA, 2331 bp, Artificial Sequence
  Synthetic
atgatcctggacaccgattacattaccgaagatggcaagccggttatccgcattttcaagaaagacaacggcgaatttaagattgaatatgatcgcaactttgaaccgtatatttacgcactgctgcgtgatgacagcgctatcgaagatgttaaaaagattaccgcggaacgtcatggccgcgtggttaaggtgaaacgcgccgaaaaagttaaaaagaaatttctgggtcgtccggtggaagtttggaaactgtatttcacgcgtccgcaggatgtgccggcaatccgtgaccgtattcgtgcacacccggcagtcgtggatatctatgaatacgacattccgtttgcaaaacgctacctgatcgataagggcattatcccgatggaaggtgacgaagaactgaaaatgctggcatttgatattgaaaccctgtatcatgaaggcgaagaattcgctgaaggtccgatcctgatgattagctacgccgatgaaaatgaagcacgcgtcatcacctggaagaaaattgatctgccgtttgtggacgttgtctctacggaaaaggaaatgatcaaacgtttcctgaaggtcattaaggaaaaagatccggacgtgctgattacctataacggcgataattttgacttcgcgtacctgaagaaacgctgcgaaaaatttggtatcaagttcacgctgggccgtgatggtagcgacccgaaaattcagcgtatgggcgaccgctttgccgtcgaagtgaaaggtcgtatccacttcgatctgtatccggtcattctgcgcaccgtgaacctgccgacctatacgctggaagctgtttacgaagcgatctttggcaccccgaaggaaaaagtgtatccggaagaaattaccacggcatgggaaacgggcgaaggtctggaacgtgttgcgcgctactcaatggaagatgccaaagtcacctttgaactgggtcgtgaatttttcccgatggaagcgcagctgtcgcgcctggttggccaatcattttgggatgtctcgcgtagctctacgggtaatctggtggaatggttcctgctgcgtaaagcgtatgaacgcaacgaactggcgccgaataaaccggatgaacgcgaatatgaacgtcgcctgcgtgaaagttatgaaggcggttacgttaaagaaccggaacgcggcctgtgggaaggtattgtgtcactggattttcgtagtctgtacccgtccattatcattacccataacgtttcgccggatacgctgaataaagaaggctgcggtgaatatgacgaagccccggaagtgggtcaccgcttctgtaaagattttccgggcttcattccgtcactgctgggttcgctgctggaagaacgccagaagatcaagaaacgtatgaaggaatctaaggatccggtggaacgcaaactgctggactatcgtcaacgcgcgatcaagattctggccaacagcttttatggctattacggttacgcgaaagcccgttggtactgcaaggaatgtgcagaaagcgtgaccgcttggggccgccagtatattgaactggtccgtcgcgaactggaagaacgtggttttaaagtgctgtatatcgataccgacggcctgtacgccacgattccgggtgaaaagaactgggaagaaatcaagcgtcgcgcactggaatttgttaactacatcaattccaaactgccgggcattctggaactggaatatgaaggcttctacacccgtggctttttcgtgacgaagaaaaagtatgcgctgatcgatgaagaaggcaaaattgtcacccgtggtctggaaatcgtgcgtcgcgattggagtgaaattgccaaagaaacccaggcacgtgttctggaagcactgctgaaagatggtaatgtcgaagaagcagtgagtattgttaaagaagtcacggaaaaactgtccaagtatgaagtcccgccggaaaaactggtgattcatgaacaaatcacccgcgaactgaaagattacaaggcgacgggcccgcacgtggcaattgctaaacgtctggcagcgcgtggcgttaagatccgtccgggtaccgttattagctatatcgtcctgaaaggctctggtcgtattggtgaccgcgccatcccgtttgatgaattcgacccggctaaacaccgctacgatgcggaatattacattgaaaatcaggtcctgccggctgtggaacgtatcctgaaagcgtttggctatcgtaaggaagatctgcgctaccagaaaacccgtcaagtgggcctgggtgcgtggctgaaaccgaagggtaaaaagtaa

SEQ ID NO: 169 - DNA, 2331 bp, Artificial Sequence
  Synthetic
atgatcctggacaccgattacattaccgaagatggcaagccggttatccgcattttcaagaaagacaacggcgaatttaagattgaatatgatcgcaactttgaaccgtatatttacgcactgctgcgtgatgacagcgctatcgaagatgttaaaaagattaccgcggaacgtcatggccgcgtggttaaggtgaaacgcgccgaaaaagttaaaaagaaatttctgggtcgtccggtggaagtttggaaactgtatttcacgcgtccgcaggatgtgccggcaatccgtgaccgtattcgtgcacacccggcagtcgtggatatctatgaatacgacattccgtttgcaaaacgctacctgatcgataagggcattatcccgatggaaggtgacgaagaactgaaaatgctggcatttgatattgaaaccctgtatcatgaaggcgaagaattcgctgaaggtccgatcctgatgattagctacgccgatgaaaatgaagcacgcgtcatcacctggaagaaaattgatctgccgtttgtggacgttgtctctacggaaaaggaaatgatcaaacgtttcctgaaggtcattaaggaaaaagatccggacgtgctgattacctataacggcgataattttgacttcgcgtacctgaagaaacgctgcgaaaaatttggtatcaagttcacgctgggccgtgatggtagcgacccgaaaattcagcgtatgggcgaccgctttgccgtcgaagtgaaaggtcgtatccacttcgatctgtatccggtcattctgcgcaccgtgaacctgccgacctatacgctggaagctgtttacgaagcgatctttggcaccccgaaggaaaaagtgtatccggaagaaattaccacggcatgggaaacgggcgaaggtctggaacgtgttgcgcgctactcaatggaagatgccaaagtcacctttgaactgggtcgtgaatttttcccgatggaagcgcagctgtcgcgcctggttggccaatcattttgggatgtctcgcgtagctctacgggtaatctggtggaatggttcctgctgcgtaaagcgtatgaacgcaacgaactggcgccgaataaaccggatgaacgcgaatatgaacgtcgcctgcgtgaaagttatgaaggcggttacgttaaagaaccggaacgcggcctgtgggaaggtattgtgtcactggattttcgtagtctgtacccgtccattatcattacccataacgtttcgccggatacgctgaataaagaaggctgcggtgaatatgacgaagccccggaagtgggtcaccgcttctgtaaagattttccgggcttcattccgtcactgctgggttcgctgctggaagaacgccagaagatcaagaaacgtatgaaggaatctaaggatccggtggaacgcaaactgctggactatcgtcaacgcgcgatcaagattctggccaacagcttttatggctattacggttacgcgaaagcccgttggtactgcaaggaatgtgcagaaagcgtgaccgcttggggccgccagtatattgaactggtccgtcgcgaactggaagaacgtggttttaaagtgctgtatatcgataccgacggcctgtacgccacgattccgggtgaaaagaactgggaagaaatcaagcgtcgcgcactggaatttgttaactacatcaattccaaactgccgggcattctggaactggaatatgaaggcttctacacccgtggctttttcgtgacgaagaaaaagtatgcgctgatcgatgaagaaggcaaaattgtcacccgtggtctggaaatcgtgcgtcgcgattggagtgaaattgccaaagaaacccaggcacgcgtcctggaagcaatcctgaaagatggtgacgtggaagaagccgtccgtattgtgaaagaagttacggaaaaactgtccaaatatgaagttccgccggaaaaactggtcatccatgaacaaattacccgcgaactgaaagattacaaagcgacgggcccgcacgtcgcaatcgctaaacgtctggcggcgcgtggcgtgaaaattcgtccgggtaccgtgatctcatatattgttctgaaaggctcgggtcgtatcggtgaccgcgctattccgtttgatgaattcgacccgaaaaaacacaaatacgatgcggaatactacatcgaaaaccaggttctgccggccgtcgaacgtattctgcgcgcatttggctaccgtaaagaagatctgcgttatcaaaaaaccaaacaagtgggtctgggtgcgtggctgaaaccgaaaggtaaaaaataa

SEQ ID NO: 170 - DNA, 2328 bp, Artificial Sequence
  Synthetic
atgatcctggacaccgattacattaccgaagatggcaagccggttatccgcattttcaagaaagacaacggcgaatttaagattgaatatgatcgcaactttgaaccgtatatttacgcactgctgcgtgatgacagcgctatcgaagatgttaaaaagattaccgcggaacgtcatggccgcgtggttaaggtgaaacgcgccgaaaaagttaaaaagaaatttctgggtcgtccggtggaagtttggaaactgtatttcacgcgtccgcaggatgtgccggcaatccgtgaccgtattcgtgcacacccggcagtcgtggatatctatgaatacgacattccgtttgcaaaacgctacctgatcgataagggcattatcccgatggaaggtgacgaagaactgaaaatgctggcatttgatattgaaaccctgtatcatgaaggcgaagaattcgctgaaggtccgatcctgatgattagctacgccgatgaaaatgaagcacgcgtcatcacctggaagaaaattgatctgccgtttgtggacgttgtctctacggaaaaggaaatgatcaaacgtttcctgaaggtcattaaggaaaaagatccggacgtgctgattacctataacggcgataattttgacttcgcgtacctgaagaaacgctgcgaaaaatttggtatcaagttcacgctgggccgtgatggtagcgacccgaaaattcagcgtatgggcgaccgctttgccgtcgaagtgaaaggtcgtatccacttcgatctgtatccggtcattctgcgcaccgtgaacctgccgacctatacgctggaagctgtttacgaagcgatctttggcaccccgaaggaaaaagtgtatccggaagaaattaccacggcatgggaaacgggcgaaggtctggaacgtgttgcgcgctactcaatggaagatgccaaagtcacctttgaactgggtcgtgaatttttcccgatggaagcgcagctgtcgcgcctggttggccaatcattttgggatgtctcgcgtagctctacgggtaatctggtggaatggttcctgctgcgtaaagcgtatgaacgcaacgaactggcgccgaataaaccggatgaacgcgaatatgaacgtcgcctgcgtgaaagttatgaaggcggttacgttaaagaaccggaacgcggcctgtgggaaggtattgtgtcactggattttcgtagtctgtacccgtccattatcattacccataacgtttcgccggatacgctgaataaagaaggctgcggtgaatatgacgaagccccggaagtgggtcaccgcttctgtaaagattttccgggcttcattccgtcactgctgggttcgctgctggaagaacgccagaagatcaagaaacgtatgaaggaatctaaggatccggtggaacgcaaactgctggactatcgtcaacgcgcgatcaagattctggccaacagcttttatggctattacggttacgcgaaagcccgttggtactgcaaggaatgtgcagaaagcgtgaccgcttggggccgccagtatattgaactggtccgtcgcgaactggaagaacgtggttttaaagtgctgtatatcgataccgacggcctgtacgccacgattccgggtgaaaagaactgggaagaaatcaagcgtcgcgcactggaatttgttaactacatcaattccaaactgccgggcattctggaactggaatatgaaggcttctacacccgtggctttttcgtgacgaagaaaaagtatgcgctgatcgatgaagaaggcaaaattgtcacccgtggtctggaaatcgtgcgtcgcgattggagtgaaattgccaaagaaacccaggcacgtgttctggaagcaattctgaaacatggtaacgtcgaagaagcggtcaaaatcgtgaaagaagttacggaaaaactgtctaactacgaaattccgccggaaaaactggccatctacgaacaaattacccgcccgctgcatgaatataaagcaatcggtccgcacgtcgcagtggcaaaacgtctggcagcacgcggcgttaaagtcaaaccgggtatggtcatcggctatattgtgctgcgtggtgatggcccgatcagcaaccgcgcaattctggctgaagaatacgatctgaaaaaacacaaatacgacgccgaatattacatcgaaaatcaggttctgccggctgtcctgcgtattctggaagcgtttggctatcgtaaagaagatctgcgctggcagaaaacccgtcaaacgggtctgacctcatggctgaatattaaaaaatcgtaa

SEQ ID NO: 171 - DNA, 2328 bp, Artificial Sequence
  Synthetic
atgatcctggacaccgattacattaccgaagatggcaagccggttatccgcattttcaagaaagacaacggcgaatttaagattgaatatgatcgcaactttgaaccgtatatttacgcactgctgcgtgatgacagcgctatcgaagatgttaaaaagattaccgcggaacgtcatggccgcgtggttaaggtgaaacgcgccgaaaaagttaaaaagaaatttctgggtcgtccggtggaagtttggaaactgtatttcacgcgtccgcaggatgtgccggcaatccgtgaccgtattcgtgcacacccggcagtcgtggatatctatgaatacgacattccgtttgcaaaacgctacctgatcgataagggcattatcccgatggaaggtgacgaagaactgaaaatgctggcatttgatattgaaaccctgtatcatgaaggcgaagaattcgctgaaggtccgatcctgatgattagctacgccgatgaaaatgaagcacgcgtcatcacctggaagaaaattgatctgccgtttgtggacgttgtctctacggaaaaggaaatgatcaaacgtttcctgaaggtcattaaggaaaaagatccggacgtgctgattacctataacggcgataattttgacttcgcgtacctgaagaaacgctgcgaaaaatttggtatcaagttcacgctgggccgtgatggtagcgacccgaaaattcagcgtatgggcgaccgctttgccgtcgaagtgaaaggtcgtatccacttcgatctgtatccggtcattctgcgcaccgtgaacctgccgacctatacgctggaagctgtttacgaagcgatctttggcaccccgaaggaaaaagtgtatccggaagaaattaccacggcatgggaaacgggcgaaggtctggaacgtgttgcgcgctactcaatggaagatgccaaagtcacctttgaactgggtcgtgaatttttcccgatggaagcgcagctgtcgcgcctggttggccaatcattttgggatgtctcgcgtagctctacgggtaatctggtggaatggttcctgctgcgtaaagcgtatgaacgcaacgaactggcgccgaataaaccggatgaacgcgaatatgaacgtcgcctgcgtgaaagttatgaaggcggttacgttaaagaaccggaacgcggcctgtgggaaggtattgtgtcactggattttcgtagtctgtacccgtccattatcattacccataacgtttcgccggatacgctgaataaagaaggctgcggtgaatatgacgaagccccggaagtgggtcaccgcttctgtaaagattttccgggcttcattccgtcactgctgggttcgctgctggaagaacgccagaagatcaagaaacgtatgaaggaatctaaggatccggtggaacgcaaactgctggactatcgtcaacgcgcgatcaagattctggccaacagcttttatggctattacggttacgcgaaagcccgttggtactgcaaggaatgtgcagaaagcgtgaccgcttggggccgccagtatattgaactggtccgtcgcgaactggaagaacgtggttttaaagtgctgtatatcgataccgacggcctgtacgccacgattccgggtgaaaagaactgggaagaaatcaagcgtcgcgcactggaatttgttaactacatcaattccaaactgccgggcattctggaactggaatatgaaggcttctacacccgtggctttttcgtgacgaagaaaaagtatgcgctgatcgatgaagaaggcaaaattgtcacccgtggtctggaaatcgtgcgtcgcgattggagtgaaattgccaaagaaacccaggcaaaagttctggaagcaatcctgaaacatggtaatgtcgaagaagcagtgaaaattgtcaaggaagtgacggaaaaactgtcgaagtatgaaatcccgccggaaaaactggtgatctacgaacaaattacccgcccgctgcatgaatataaagcgattggcccgcacgtggcagttgctaaacgtctggcagcccgcggtgtcaaagtgcgtccgggcatggtgatcggttatattgttctgcgtggcgatggtccgatcagtaaacgcgcgattctggccgaagaatttgatccgcgcaaacacaagtacgacgccgaatattacatcgaaaaccaggtgctgccggctgttctgcgtattctggaagcgttcggctatcgtaaagaagatctgcgctggcagaaaaccaagcaaacgggtctgaccgcatggctgaatgtgaaaaagaaataa

SEQ ID NO: 172 - DNA, 2328 bp, Artificial Sequence
  Synthetic
atgatcctggacaccgattacattaccgaagatggcaagccggttatccgcattttcaagaaagacaacggcgaatttaagattgaatatgatcgcaactttgaaccgtatatttacgcactgctgcgtgatgacagcgctatcgaagatgttaaaaagattaccgcggaacgtcatggccgcgtggttaaggtgaaacgcgccgaaaaagttaaaaagaaatttctgggtcgtccggtggaagtttggaaactgtatttcacgcgtccgcaggatgtgccggcaatccgtgaccgtattcgtgcacacccggcagtcgtggatatctatgaatacgacattccgtttgcaaaacgctacctgatcgataagggcattatcccgatggaaggtgacgaagaactgaaaatgctggcatttgatattgaaaccctgtatcatgaaggcgaagaattcgctgaaggtccgatcctgatgattagctacgccgatgaaaatgaagcacgcgtcatcacctggaagaaaattgatctgccgtttgtggacgttgtctctacggaaaaggaaatgatcaaacgtttcctgaaggtcattaaggaaaaagatccggacgtgctgattacctataacggcgataattttgacttcgcgtacctgaagaaacgctgcgaaaaatttggtatcaagttcacgctgggccgtgatggtagcgacccgaaaattcagcgtatgggcgaccgctttgccgtcgaagtgaaaggtcgtatccacttcgatctgtatccggtcattctgcgcaccgtgaacctgccgacctatacgctggaagctgtttacgaagcgatctttggcaccccgaaggaaaaagtgtatccggaagaaattaccacggcatgggaaacgggcgaaggtctggaacgtgttgcgcgctactcaatggaagatgccaaagtcacctttgaactgggtcgtgaatttttcccgatggaagcgcagctgtcgcgcctggttggccaatcattttgggatgtctcgcgtagctctacgggtaatctggtggaatggttcctgctgcgtaaagcgtatgaacgcaacgaactggcgccgaataaaccgtcgggccgcgaatacgatgaacgtcgcgaaggttatgcgggcggttacgttaaagaaccggaacgtggtctgtgggaaaacatcgtgtacctggattacaaaagtctgtatccgtccattatcattacccataacgtgagcccggacacgctgaatcgcgaaggctgcaaagaatacgatgtcgccccgcaagtgggtcacaaattttgtaaagactttccgggcttcattccgtctctgctgggtgatctgctggaagaacgtcagaaaattaaaaagaaaatgaaagcaaccaaagatccgattgagaaaaaactgctggactatcgtcaacgcgcgatcaaaattctggccaacagttattacggctattacggttatgcgaaagcccgctggtactgcaaagaatgtgcagaatccgttacggcttggggccgtgaatatatcgaaaccacgatccgcgaaatcgaagaaaaatacggtttcaaagtgctgtacgccgataccgacggcttccatgcaacgatcccgggtgaagatgctgaagaaattaagaaaaaagcgaaagaattcctgaaatacatcaacagcaaactgccgggcgccctggaactggaatatgaaggcttctaccgtcgcggctttttcgtgaccaagaaaaaatacgcagttatcgacgaagaaggcaaaattaccacgcgtggtctggaaatcgtgcgtcgcgattggagtgaaattgccaaagaaacccaggcacgcgttctggaagcaatcctgcgtcatggtgacgtcgaagaagccgttcgcattgtcaaagatgtgacggaaaagctgtcgaaatatgaagtcccgccggaaaaactggtgatccatgaacaaattacccgtgaactgaaggattacaaagcgacgggcccgcacgttgcaattgctaaacgcctggcagcccgtggcatcaagattcgtccgggtaccgttatcagctatattgtcctgaaaggctctggtcgcatcggtgatcgtgctattccgtttgatgaattcgacccgacgaaacaccgttacgatgccgaatattacatcgaaaatcaggtgctgccggccgttgaacgcattctgaaagcatttggctataagaaagaagaactgcgctaccagaaaacccgtcaagtgggcctgggtgcgtggctgaagctgaaaggtaagaaataa

SEQ ID NO: 173 - DNA, 2322 bp, Artificial Sequence
  Synthetic
atgatcctggacaccgattacattaccgaagatggcaagccggttatccgcattttcaagaaagacaacggcgaatttaagattgaatatgatcgcaactttgaaccgtatatttacgcactgctgcgtgatgacagcgctatcgaagatgttaaaaagattaccgcggaacgtcatggccgcgtggttaaggtgaaacgcgccgaaaaagttaaaaagaaatttctgggtcgtccggtggaagtttggaaactgtatttcacgcgtccgcaggatgtgccggcaatccgtgaccgtattcgtgcacacccggcagtcgtggatatctatgaatacgacattccgtttgcaaaacgctacctgatcgataagggcattatcccgatggaaggtgacgaagaactgaaaatgctggcatttgatattgaaaccctgtatcatgaaggcgaagaattcgctgaaggtccgatcctgatgattagctacgccgatgaaaatgaagcacgcgtcatcacctggaagaaaattgatctgccgtttgtggacgttgtctctacggaaaaggaaatgatcaaacgtttcctgaaggtcattaaggaaaaagatccggacgtgctgattacctataacggcgataattttgacttcgcgtacctgaagaaacgctgcgaaaaatttggtatcaagttcacgctgggccgtgatggtagcgacccgaaaattcagcgtatgggcgaccgctttgccgtcgaagtgaaaggtcgtatccacttcgatctgtatccggtcattctgcgcaccgtgaacctgccgacctatacgctggaagctgtttacgaagcgatctttggcaccccgaaggaaaaagtgtatccggaagaaattaccacggcatgggaaacgggcgaaggtctggaacgtgttgcgcgctactcaatggaagatgccaaagtcacctttgaactgggtcgtgaatttttcccgatggaagcgcagctgtcgcgcctggttggccaatcattttgggatgtctcgcgtagctctacgggtaatctggtggaatggttcctgctgcgtaaagcgtatgaacgcaacgaactggcgccgaataaaccgtcgggccgcgaatacgatgaacgtcgcgaaggttatgcgggcggttacgttaaagaaccggaacgtggtctgtgggaaaacatcgtgtacctggattacaaaagtctgtatccgtccattatcattacccataacgtgagcccggacacgctgaatcgcgaaggctgcaaagaatacgatgtcgccccgcaagtgggtcacaaattttgtaaagactttccgggcttcattccgtctctgctgggtgatctgctggaagaacgtcagaaaattaaaaagaaaatgaaagcaaccaaagatccgattgagaaaaaactgctggactatcgtcaacgcgcgatcaaaattctggccaacagttattacggctattacggttatgcgaaagcccgctggtactgcaaagaatgtgcagaatccgttacggcttggggccgtgaatatatcgaaaccacgatccgcgaaatcgaagaaaaatacggtttcaaagtgctgtacgccgataccgacggcttccatgcaacgatcccgggtgaagatgctgaagaaattaagaaaaaagcgaaagaattcctgaaatacatcaacagcaaactgccgggcgccctggaactggaatatgaaggcttctaccgtcgcggctttttcgtgaccaagaaaaaatacgcagttatcgacgaagaaggcaaaattaccacgcgtggtctggaaatcgtgcgtcgcgattggagtgaaattgccaaagaaacccaggcacgtgtcctggaagcaatcctgaaacatggtgatgtggaagaagcggttcgcattgtcaaagaagtgacggaaaagctgtcgaaatatgaagttccgccggaaaaactggtcatccatgaacaaattacccgcgatctgcgtgactacaaagccacgggtccgcacgtggcagttgcaaaacgtctggcagcccgtggcgtgaagattcgtccgggtaccgtgatcagttatattgttctgaaaggctccggtcgcatcggtgaccgtgctattccgtttgatgaattcgacccgacgaaacaccgttacgatgccgaatattacatcgaaaatcaggtcctgccggccgtggaacgcattctgaaagcatttggttatcgcaaggaagatctgcgttaccagaagaccaaacaagtcggcctgggtgcgtggctgaaagtgaaaaagtaa

SEQ ID NO: 174 - DNA, 2328 bp, Artificial Sequence
  Synthetic
atgatcctggacaccgattacattaccgaagatggcaagccggttatccgcattttcaagaaagacaacggcgaatttaagattgaatatgatcgcaactttgaaccgtatatttacgcactgctgcgtgatgacagcgctatcgaagatgttaaaaagattaccgcggaacgtcatggccgcgtggttaaggtgaaacgcgccgaaaaagttaaaaagaaatttctgggtcgtccggtggaagtttggaaactgtatttcacgcgtccgcaggatgtgccggcaatccgtgaccgtattcgtgcacacccggcagtcgtggatatctatgaatacgacattccgtttgcaaaacgctacctgatcgataagggcattatcccgatggaaggtgacgaagaactgaaaatgctggcatttgatattgaaaccctgtatcatgaaggcgaagaattcgctgaaggtccgatcctgatgattagctacgccgatgaaaatgaagcacgcgtcatcacctggaagaaaattgatctgccgtttgtggacgttgtctctacggaaaaggaaatgatcaaacgtttcctgaaggtcattaaggaaaaagatccggacgtgctgattacctataacggcgataattttgacttcgcgtacctgaagaaacgctgcgaaaaatttggtatcaagttcacgctgggccgtgatggtagcgacccgaaaattcagcgtatgggcgaccgctttgccgtcgaagtgaaaggtcgtatccacttcgatctgtatccggtcattctgcgcaccgtgaacctgccgacctatacgctggaagctgtttacgaagcgatctttggcaccccgaaggaaaaagtgtatccggaagaaattaccacggcatgggaaacgggcgaaggtctggaacgtgttgcgcgctactcaatggaagatgccaaagtcacctttgaactgggtcgtgaatttttcccgatggaagcgcagctgtcgcgcctggttggccaatcattttgggatgtctcgcgtagctctacgggtaatctggtggaatggttcctgctgcgtaaagcgtatgaacgcaacgaactggcgccgaataaaccgtcgggccgcgaatacgatgaacgtcgcgaaggttatgcgggcggttacgttaaagaaccggaacgtggtctgtgggaaaacatcgtgtacctggattacaaaagtctgtatccgtccattatcattacccataacgtgagcccggacacgctgaatcgcgaaggctgcaaagaatacgatgtcgccccgcaagtgggtcacaaattttgtaaagactttccgggcttcattccgtctctgctgggtgatctgctggaagaacgtcagaaaattaaaaagaaaatgaaagcaaccaaagatccgattgagaaaaaactgctggactatcgtcaacgcgcgatcaaaattctggccaacagttattacggctattacggttatgcgaaagcccgctggtactgcaaagaatgtgcagaatccgttacggcttggggccgtgaatatatcgaaaccacgatccgcgaaatcgaagaaaaatacggtttcaaagtgctgtacgccgataccgacggcttccatgcaacgatcccgggtgaagatgctgaagaaattaagaaaaaagcgaaagaattcctgaaatacatcaacagcaaactgccgggcgccctggaactggaatatgaaggcttctaccgtcgcggctttttcgtgaccaagaaaaaatacgcagttatcgacgaagaaggcaaaattaccacgcgtggtctggaaatcgtgcgtcgcgattggagtgaaattgccaaagaaacccaggcacgtgtgctggaagctctgctgaaagatggcaatgttgaagaagcggtttccattgtcaaagaagtgacggaaaagctgggtaaatatgaagtcccgccggaaaaactggtgatccatgaacaaattacccgcgaactgaaggattacaaagcgacgggcccgcacgttgctatcgcgaaacgtctggcagcgcgtggcgtgaagattcgtccgggtaccgttatcagctatattgtcctgaaaggctctggtcgtatcggtgaccgcgcgattccgtttgatgaattcgacccgacgaaacatcgctacgatgcagaatattacatcgaaaaccaggttctgccggctgtcgaacgtattctgaaagcgtttggctatcgtgccgaagatctgcgctaccagaaaacccgtcaagtgggcctgggtgtttggctgcaaccgaaaggtaagaaataa

SEQ ID NO: 175 - DNA, 2325 bp, Artificial Sequence
  Synthetic
atgatcctggacaccgattacattaccgaagatggcaagccggttatccgcattttcaagaaagacaacggcgaatttaagattgaatatgatcgcaactttgaaccgtatatttacgcactgctgcgtgatgacagcgctatcgaagatgttaaaaagattaccgcggaacgtcatggccgcgtggttaaggtgaaacgcgccgaaaaagttaaaaagaaatttctgggtcgtccggtggaagtttggaaactgtatttcacgcgtccgcaggatgtgccggcaatccgtgaccgtattcgtgcacacccggcagtcgtggatatctatgaatacgacattccgtttgcaaaacgctacctgatcgataagggcattatcccgatggaaggtgacgaagaactgaaaatgctggcatttgatattgaaaccctgtatcatgaaggcgaagaattcgctgaaggtccgatcctgatgattagctacgccgatgaaaatgaagcacgcgtcatcacctggaagaaaattgatctgccgtttgtggacgttgtctctacggaaaaggaaatgatcaaacgtttcctgaaggtcattaaggaaaaagatccggacgtgctgattacctataacggcgataattttgacttcgcgtacctgaagaaacgctgcgaaaaatttggtatcaagttcacgctgggccgtgatggtagcgacccgaaaattcagcgtatgggcgaccgctttgccgtcgaagtgaaaggtcgtatccacttcgatctgtatccggtcattctgcgcaccgtgaacctgccgacctatacgctggaagctgtttacgaagcgatctttggcaccccgaaggaaaaagtgtatccggaagaaattaccacggcatgggaaacgggcgaaggtctggaacgtgttgcgcgctactcaatggaagatgccaaagtcacctttgaactgggtcgtgaatttttcccgatggaagcgcagctgtcgcgcctggttggccaatcattttgggatgtctcgcgtagctctacgggtaatctggtggaatggttcctgctgcgtaaagcgtatgaacgcaacgaactggcgccgaataaaccgtcgggccgcgaatacgatgaacgtcgcgaaggttatgcgggcggttacgttaaagaaccggaacgtggtctgtgggaaaacatcgtgtacctggattacaaaagtctgtatccgtccattatcattacccataacgtgagcccggacacgctgaatcgcgaaggctgcaaagaatacgatgtcgccccgcaagtgggtcacaaattttgtaaagactttccgggcttcattccgtctctgctgggtgatctgctggaagaacgtcagaaaattaaaaagaaaatgaaagcaaccaaagatccgattgagaaaaaactgctggactatcgtcaacgcgcgatcaaaattctggccaacagttattacggctattacggttatgcgaaagcccgctggtactgcaaagaatgtgcagaatccgttacggcttggggccgtgaatatatcgaaaccacgatccgcgaaatcgaagaaaaatacggtttcaaagtgctgtacgccgataccgacggcttccatgcaacgatcccgggtgaagatgctgaagaaattaagaaaaaagcgaaagaattcctgaaatacatcaacagcaaactgccgggcgccctggaactggaatatgaaggcttctaccgtcgcggctttttcgtgaccaagaaaaaatacgcagttatcgacgaagaaggcaaaattaccacgcgtggtctggaaatcgtgcgtcgcgattggagtgaaattgccaaagaaacccaggcaaaggttctggaagcaattctgaaacatggtaacgtcgaagaagcggtcaagatcgtgaaagaagttaccgaaaaactgtcgaattatgaaattccggtcgaaaagctggtgatctacgaacaaattacgcgcccgctgaacgaatataaagccattggcccgcacgtggcagttgctaaacgtctggcggccaagggtatcaagattaaaccgggcatggtgattggttatgttgtcctgcgcggcgatggtccgatcagcaaacgtgcgatcgccatcgaagaattcgatggcaaaaagcataagtacgacgcagaatactacatcgaaaatcaggttctgccggccgtcgaacgtatcctgaaagcattcggttataagcgtgaagatctgcgctggcagaagaccaaacaagtgggcctgggtgcgtggctgaaagttaaaaagtcttaa

SEQ ID NO: 176 - DNA, 2328 bp, Artificial Sequence
  Synthetic
atgatcctggacaccgattacattaccgaagatggcaagccggttatccgcattttcaagaaagacaacggcgaatttaagattgaatatgatcgcaactttgaaccgtatatttacgcactgctgcgtgatgacagcgctatcgaagatgttaaaaagattaccgcggaacgtcatggccgcgtggttaaggtgaaacgcgccgaaaaagttaaaaagaaatttctgggtcgtccggtggaagtttggaaactgtatttcacgcgtccgcaggatgtgccggcaatccgtgaccgtattcgtgcacacccggcagtcgtggatatctatgaatacgacattccgtttgcaaaacgctacctgatcgataagggcattatcccgatggaaggtgacgaagaactgaaaatgctggcatttgatattgaaaccctgtatcatgaaggcgaagaattcgctgaaggtccgatcctgatgattagctacgccgatgaaaatgaagcacgcgtcatcacctggaagaaaattgatctgccgtttgtggacgttgtctctacggaaaaggaaatgatcaaacgtttcctgaaggtcattaaggaaaaagatccggacgtgctgattacctataacggcgataattttgacttcgcgtacctgaagaaacgctgcgaaaaatttggtatcaagttcacgctgggccgtgatggtagcgacccgaaaattcagcgtatgggcgaccgctttgccgtcgaagtgaaaggtcgtatccacttcgatctgtatccggtcattctgcgcaccgtgaacctgccgacctatacgctggaagctgtttacgaagcgatctttggcaccccgaaggaaaaagtgtatccggaagaaattaccacggcatgggaaacgggcgaaggtctggaacgtgttgcgcgctactcaatggaagatgccaaagtcacctttgaactgggtcgtgaatttttcccgatggaagcgcagctgtcgcgcctggttggccaatcattttgggatgtctcgcgtagctctacgggtaatctggtggaatggttcctgctgcgtaaagcgtatgaacgcaacgaactggcgccgaataaaccgtcgggccgcgaatacgatgaacgtcgcgaaggttatgcgggcggttacgttaaagaaccggaacgtggtctgtgggaaaacatcgtgtacctggattacaaaagtctgtatccgtccattatcattacccataacgtgagcccggacacgctgaatcgcgaaggctgcaaagaatacgatgtcgccccgcaagtgggtcacaaattttgtaaagactttccgggcttcattccgtctctgctgggtgatctgctggaagaacgtcagaaaattaaaaagaaaatgaaagcaaccaaagatccgattgagaaaaaactgctggactatcgtcaacgcgcgatcaaaattctggccaacagttattacggctattacggttatgcgaaagcccgctggtactgcaaagaatgtgcagaatccgttacggcttggggccgtgaatatatcgaaaccacgatccgcgaaatcgaagaaaaatacggtttcaaagtgctgtacgccgataccgacggcttccatgcaacgatcccgggtgaagatgctgaagaaattaagaaaaaagcgaaagaattcctgaaatacatcaacagcaaactgccgggcgccctggaactggaatatgaaggcttctaccgtcgcggctttttcgtgaccaagaaaaaatacgcagttatcgacgaagaaggcaaaattaccacgcgtggtctggaaatcgtgcgtcgcgattggagtgaaattgccaaagaaacccaggcacgtgttctggaagcactgctgaaagatggtaatgtcgaagaagcagtgagtattgttaaagaagtcacggaaaaactgtccaagtatgaagtcccgccggaaaaactggtgattcatgaacaaatcacccgcgaactgaaagattacaaggcgacgggcccgcacgtggcaattgctaaacgtctggcagcgcgtggcgttaagatccgtccgggtaccgttattagctatatcgtcctgaaaggctctggtcgtattggtgaccgcgccatcccgtttgatgaattcgacccggctaaacaccgctacgatgcggaatattacattgaaaatcaggtcctgccggctgtggaacgtatcctgaaagcgtttggctatcgtaaggaagatctgcgctaccagaaaacccgtcaagtgggcctgggtgcgtggctgaaaccgaagggtaaaaagtaa

SEQ ID NO: 177 - DNA, 2328 bp, Artificial Sequence
  Synthetic
atgatcctggacaccgattacattaccgaagatggcaagccggttatccgcattttcaagaaagacaacggcgaatttaagattgaatatgatcgcaactttgaaccgtatatttacgcactgctgcgtgatgacagcgctatcgaagatgttaaaaagattaccgcggaacgtcatggccgcgtggttaaggtgaaacgcgccgaaaaagttaaaaagaaatttctgggtcgtccggtggaagtttggaaactgtatttcacgcgtccgcaggatgtgccggcaatccgtgaccgtattcgtgcacacccggcagtcgtggatatctatgaatacgacattccgtttgcaaaacgctacctgatcgataagggcattatcccgatggaaggtgacgaagaactgaaaatgctggcatttgatattgaaaccctgtatcatgaaggcgaagaattcgctgaaggtccgatcctgatgattagctacgccgatgaaaatgaagcacgcgtcatcacctggaagaaaattgatctgccgtttgtggacgttgtctctacggaaaaggaaatgatcaaacgtttcctgaaggtcattaaggaaaaagatccggacgtgctgattacctataacggcgataattttgacttcgcgtacctgaagaaacgctgcgaaaaatttggtatcaagttcacgctgggccgtgatggtagcgacccgaaaattcagcgtatgggcgaccgctttgccgtcgaagtgaaaggtcgtatccacttcgatctgtatccggtcattctgcgcaccgtgaacctgccgacctatacgctggaagctgtttacgaagcgatctttggcaccccgaaggaaaaagtgtatccggaagaaattaccacggcatgggaaacgggcgaaggtctggaacgtgttgcgcgctactcaatggaagatgccaaagtcacctttgaactgggtcgtgaatttttcccgatggaagcgcagctgtcgcgcctggttggccaatcattttgggatgtctcgcgtagctctacgggtaatctggtggaatggttcctgctgcgtaaagcgtatgaacgcaacgaactggcgccgaataaaccgtcgggccgcgaatacgatgaacgtcgcgaaggttatgcgggcggttacgttaaagaaccggaacgtggtctgtgggaaaacatcgtgtacctggattacaaaagtctgtatccgtccattatcattacccataacgtgagcccggacacgctgaatcgcgaaggctgcaaagaatacgatgtcgccccgcaagtgggtcacaaattttgtaaagactttccgggcttcattccgtctctgctgggtgatctgctggaagaacgtcagaaaattaaaaagaaaatgaaagcaaccaaagatccgattgagaaaaaactgctggactatcgtcaacgcgcgatcaaaattctggccaacagttattacggctattacggttatgcgaaagcccgctggtactgcaaagaatgtgcagaatccgttacggcttggggccgtgaatatatcgaaaccacgatccgcgaaatcgaagaaaaatacggtttcaaagtgctgtacgccgataccgacggcttccatgcaacgatcccgggtgaagatgctgaagaaattaagaaaaaagcgaaagaattcctgaaatacatcaacagcaaactgccgggcgccctggaactggaatatgaaggcttctaccgtcgcggctttttcgtgaccaagaaaaaatacgcagttatcgacgaagaaggcaaaattaccacgcgtggtctggaaatcgtgcgtcgcgattggagtgaaattgccaaagaaacccaggcacgcgtcctggaagcaatcctgaaagatggtgacgtggaagaagccgtccgtattgtgaaagaagttacggaaaaactgtccaaatatgaagttccgccggaaaaactggtcatccatgaacaaattacccgcgaactgaaagattacaaagcgacgggcccgcacgtcgcaatcgctaaacgtctggcggcgcgtggcgtgaaaattcgtccgggtaccgtgatctcatatattgttctgaaaggctcgggtcgtatcggtgaccgcgctattccgtttgatgaattcgacccgaaaaaacacaaatacgatgcggaatactacatcgaaaaccaggttctgccggccgtcgaacgtattctgcgcgcatttggctaccgtaaagaagatctgcgttatcaaaaaaccaaacaagtgggtctgggtgcgtggctgaaaccgaaaggtaaaaaataa

SEQ ID NO: 178 - DNA, 2325 bp, Artificial Sequence
  Synthetic
atgatcctggacaccgattacattaccgaagatggcaagccggttatccgcattttcaagaaagacaacggcgaatttaagattgaatatgatcgcaactttgaaccgtatatttacgcactgctgcgtgatgacagcgctatcgaagatgttaaaaagattaccgcggaacgtcatggccgcgtggttaaggtgaaacgcgccgaaaaagttaaaaagaaatttctgggtcgtccggtggaagtttggaaactgtatttcacgcgtccgcaggatgtgccggcaatccgtgaccgtattcgtgcacacccggcagtcgtggatatctatgaatacgacattccgtttgcaaaacgctacctgatcgataagggcattatcccgatggaaggtgacgaagaactgaaaatgctggcatttgatattgaaaccctgtatcatgaaggcgaagaattcgctgaaggtccgatcctgatgattagctacgccgatgaaaatgaagcacgcgtcatcacctggaagaaaattgatctgccgtttgtggacgttgtctctacggaaaaggaaatgatcaaacgtttcctgaaggtcattaaggaaaaagatccggacgtgctgattacctataacggcgataattttgacttcgcgtacctgaagaaacgctgcgaaaaatttggtatcaagttcacgctgggccgtgatggtagcgacccgaaaattcagcgtatgggcgaccgctttgccgtcgaagtgaaaggtcgtatccacttcgatctgtatccggtcattctgcgcaccgtgaacctgccgacctatacgctggaagctgtttacgaagcgatctttggcaccccgaaggaaaaagtgtatccggaagaaattaccacggcatgggaaacgggcgaaggtctggaacgtgttgcgcgctactcaatggaagatgccaaagtcacctttgaactgggtcgtgaatttttcccgatggaagcgcagctgtcgcgcctggttggccaatcattttgggatgtctcgcgtagctctacgggtaatctggtggaatggttcctgctgcgtaaagcgtatgaacgcaacgaactggcgccgaataaaccgtcgggccgcgaatacgatgaacgtcgcgaaggttatgcgggcggttacgttaaagaaccggaacgtggtctgtgggaaaacatcgtgtacctggattacaaaagtctgtatccgtccattatcattacccataacgtgagcccggacacgctgaatcgcgaaggctgcaaagaatacgatgtcgccccgcaagtgggtcacaaattttgtaaagactttccgggcttcattccgtctctgctgggtgatctgctggaagaacgtcagaaaattaaaaagaaaatgaaagcaaccaaagatccgattgagaaaaaactgctggactatcgtcaacgcgcgatcaaaattctggccaacagttattacggctattacggttatgcgaaagcccgctggtactgcaaagaatgtgcagaatccgttacggcttggggccgtgaatatatcgaaaccacgatccgcgaaatcgaagaaaaatacggtttcaaagtgctgtacgccgataccgacggcttccatgcaacgatcccgggtgaagatgctgaagaaattaagaaaaaagcgaaagaattcctgaaatacatcaacagcaaactgccgggcgccctggaactggaatatgaaggcttctaccgtcgcggctttttcgtgaccaagaaaaaatacgcagttatcgacgaagaaggcaaaattaccacgcgtggtctggaaatcgtgcgtcgcgattggagtgaaattgccaaagaaacccaggcacgtgttctggaagcaattctgaaacatggtaacgtcgaagaagcggtcaaaatcgtgaaagaagttacggaaaaactgtctaactacgaaattccgccggaaaaactggccatctacgaacaaattacccgcccgctgcatgaatataaagcaatcggtccgcacgtcgcagtggcaaaacgtctggcagcacgcggcgttaaagtcaaaccgggtatggtcatcggctatattgtgctgcgtggtgatggcccgatcagcaaccgcgcaattctggctgaagaatacgatctgaaaaaacacaaatacgacgccgaatattacatcgaaaatcaggttctgccggctgtcctgcgtattctggaagcgtttggctatcgtaaagaagatctgcgctggcagaaaacccgtcaaacgggtctgacctcatggctgaatattaaaaaatcgtaa

SEQ ID NO: 179 - DNA, 2325 bp, Artificial Sequence
  Synthetic
atgatcctggacaccgattacattaccgaagatggcaagccggttatccgcattttcaagaaagacaacggcgaatttaagattgaatatgatcgcaactttgaaccgtatatttacgcactgctgcgtgatgacagcgctatcgaagatgttaaaaagattaccgcggaacgtcatggccgcgtggttaaggtgaaacgcgccgaaaaagttaaaaagaaatttctgggtcgtccggtggaagtttggaaactgtatttcacgcgtccgcaggatgtgccggcaatccgtgaccgtattcgtgcacacccggcagtcgtggatatctatgaatacgacattccgtttgcaaaacgctacctgatcgataagggcattatcccgatggaaggtgacgaagaactgaaaatgctggcatttgatattgaaaccctgtatcatgaaggcgaagaattcgctgaaggtccgatcctgatgattagctacgccgatgaaaatgaagcacgcgtcatcacctggaagaaaattgatctgccgtttgtggacgttgtctctacggaaaaggaaatgatcaaacgtttcctgaaggtcattaaggaaaaagatccggacgtgctgattacctataacggcgataattttgacttcgcgtacctgaagaaacgctgcgaaaaatttggtatcaagttcacgctgggccgtgatggtagcgacccgaaaattcagcgtatgggcgaccgctttgccgtcgaagtgaaaggtcgtatccacttcgatctgtatccggtcattctgcgcaccgtgaacctgccgacctatacgctggaagctgtttacgaagcgatctttggcaccccgaaggaaaaagtgtatccggaagaaattaccacggcatgggaaacgggcgaaggtctggaacgtgttgcgcgctactcaatggaagatgccaaagtcacctttgaactgggtcgtgaatttttcccgatggaagcgcagctgtcgcgcctggttggccaatcattttgggatgtctcgcgtagctctacgggtaatctggtggaatggttcctgctgcgtaaagcgtatgaacgcaacgaactggcgccgaataaaccgtcgggccgcgaatacgatgaacgtcgcgaaggttatgcgggcggttacgttaaagaaccggaacgtggtctgtgggaaaacatcgtgtacctggattacaaaagtctgtatccgtccattatcattacccataacgtgagcccggacacgctgaatcgcgaaggctgcaaagaatacgatgtcgccccgcaagtgggtcacaaattttgtaaagactttccgggcttcattccgtctctgctgggtgatctgctggaagaacgtcagaaaattaaaaagaaaatgaaagcaaccaaagatccgattgagaaaaaactgctggactatcgtcaacgcgcgatcaaaattctggccaacagttattacggctattacggttatgcgaaagcccgctggtactgcaaagaatgtgcagaatccgttacggcttggggccgtgaatatatcgaaaccacgatccgcgaaatcgaagaaaaatacggtttcaaagtgctgtacgccgataccgacggcttccatgcaacgatcccgggtgaagatgctgaagaaattaagaaaaaagcgaaagaattcctgaaatacatcaacagcaaactgccgggcgccctggaactggaatatgaaggcttctaccgtcgcggctttttcgtgaccaagaaaaaatacgcagttatcgacgaagaaggcaaaattaccacgcgtggtctggaaatcgtgcgtcgcgattggagtgaaattgccaaagaaacccaggcaaaagttctggaagcaatcctgaaacatggtaatgtcgaagaagcagtgaaaattgtcaaggaagtgacggaaaaactgtcgaagtatgaaatcccgccggaaaaactggtgatctacgaacaaattacccgcccgctgcatgaatataaagcgattggcccgcacgtggcagttgctaaacgtctggcagcccgcggtgtcaaagtgcgtccgggcatggtgatcggttatattgttctgcgtggcgatggtccgatcagtaaacgcgcgattctggccgaagaatttgatccgcgcaaacacaagtacgacgccgaatattacatcgaaaaccaggtgctgccggctgttctgcgtattctggaagcgttcggctatcgtaaagaagatctgcgctggcagaaaaccaagcaaacgggtctgaccgcatggctgaatgtgaaaaagaaataa

SEQ ID NO: 180 - DNA, 2331 bp, Artificial Sequence
  Synthetic
atgatcctggacaccgattacattaccgaagatggcaagccggttatccgcattttcaagaaagacaacggcgaatttaagattgaatatgatcgcaactttgaaccgtatatttacgcactgctgcgtgatgacagcgctatcgaagatgttaaaaagattaccgcggaacgtcatggccgcgtggttaaggtgaaacgcgccgaaaaagttaaaaagaaatttctgggtcgtccggtggaagtttggaaactgtatttcacgcgtccgcaggatgtgccggcaatccgtgaccgtattcgtgcacacccggcagtcgtggatatctatgaatacgacattccgtttgcaaaacgctacctgatcgataagggcattatcccgatggaaggtgacgaagaactgaaaatgctggcatttgatattgaaaccctgtatcatgaaggcgaagaattcgctgaaggtccgatcctgatgattagctacgccgatgaaaatgaagcacgcgtcatcacctggaagaaaattgatctgccgtttgtggacgttgtctctacggaaaaggaaatgatcaaacgtttcctgaaggtcattaaggaaaaagatccggacgtgctgattacctataacggcgataattttgacttcgcgtacctgaagaaacgctgcgaaaaatttggtatcaagttcacgctgggccgtgatggtagcgacccgaaaattcagcgtatgggcgaccgctttgccgtcgaagtgaaaggtcgtatccacttcgatctgtatccggtcattctgcgcaccgtgaacctgccgacctatacgctggaagctgtttacgaagcgatctttggcaccccgaaggaaaaagtgtatccggaagaaattaccacggcatgggaaacgggcgaaggtctggaacgtgttgcgcgctactcaatggaagatgccaaagtcacctttgaactgggtcgtgaatttttcccgatggaagcgcagctgtcgcgcctggttggccaatcattttgggatgtctcgcgtagctctacgggtaatctggtggaatggttcctgctgcgtaaagcgtatgaacgcaacgaactggcaccgaataaaccggatgaacgtgaatatgaacgtcgcctgcgcgaatcttatgccggcggttacgttaaggaaccggaaaaaggcctgtgggaaggtctggtgtctctggattttcgctcactgtacccgtcgattatcattacgcataacgtgtccccggacaccctgaatcgtgaaggctgcatggaatatgatgttgctccggaagtcaaacacaagttttgtaaagactttccgggtttcattccgtcactgctgaaacgtctgctggatgaacgccaggaaatcaaacgtcgcatgaaagcctcgaaggatccgattgaaaagaaaatgctggactatcgtcaacgcgcaatcaaaattctggctaatagctattacggctattacggttatgcgaaggcccgctggtactgcaaagaatgtgcggaatctgtcacggcctggggccgtgaatatatcgaatttgtgcgcaaagaactggaagaaaagttcggtttcaaggttctgtacattgatacggacggcctgtacgcaaccatcccgggtgctaaaccggaagaaattaagcgtaaggccctggaatttgtggaatacatcaacgcaaaactgccgggcctgctggaactggaatatgaaggcttctacgttcgcggctttttcgtcacgaagaaaaagtatgcgctgattgacgaagaaggcaaaatcattacccgtggtctggaaatcgttcgtcgcgattggagtgaaattgccaaagaaacccaggcacgcgttctggaagcaatcctgcgtcatggtgacgtcgaagaagccgttcgcattgtcaaagatgtgacggaaaagctgtcgaaatatgaagtcccgccggaaaaactggtgatccatgaacaaattacccgtgaactgaaggattacaaagcgacgggcccgcacgttgcaattgctaaacgcctggcagcccgtggcatcaagattcgtccgggtaccgttatcagctatattgtcctgaaaggctctggtcgcatcggtgatcgtgctattccgtttgatgaattcgacccgacgaaacaccgttacgatgccgaatattacatcgaaaatcaggtgctgccggccgttgaacgcattctgaaagcatttggctataagaaagaagaactgcgctaccagaaaacccgtcaagtgggcctgggtgcgtggctgaagctgaaaggtaagaaataa

SEQ ID NO: 181 - DNA, 2325 bp, Artificial Sequence
  Synthetic
atgatcctggacaccgattacattaccgaagatggcaagccggttatccgcattttcaagaaagacaacggcgaatttaagattgaatatgatcgcaactttgaaccgtatatttacgcactgctgcgtgatgacagcgctatcgaagatgttaaaaagattaccgcggaacgtcatggccgcgtggttaaggtgaaacgcgccgaaaaagttaaaaagaaatttctgggtcgtccggtggaagtttggaaactgtatttcacgcgtccgcaggatgtgccggcaatccgtgaccgtattcgtgcacacccggcagtcgtggatatctatgaatacgacattccgtttgcaaaacgctacctgatcgataagggcattatcccgatggaaggtgacgaagaactgaaaatgctggcatttgatattgaaaccctgtatcatgaaggcgaagaattcgctgaaggtccgatcctgatgattagctacgccgatgaaaatgaagcacgcgtcatcacctggaagaaaattgatctgccgtttgtggacgttgtctctacggaaaaggaaatgatcaaacgtttcctgaaggtcattaaggaaaaagatccggacgtgctgattacctataacggcgataattttgacttcgcgtacctgaagaaacgctgcgaaaaatttggtatcaagttcacgctgggccgtgatggtagcgacccgaaaattcagcgtatgggcgaccgctttgccgtcgaagtgaaaggtcgtatccacttcgatctgtatccggtcattctgcgcaccgtgaacctgccgacctatacgctggaagctgtttacgaagcgatctttggcaccccgaaggaaaaagtgtatccggaagaaattaccacggcatgggaaacgggcgaaggtctggaacgtgttgcgcgctactcaatggaagatgccaaagtcacctttgaactgggtcgtgaatttttcccgatggaagcgcagctgtcgcgcctggttggccaatcattttgggatgtctcgcgtagctctacgggtaatctggtggaatggttcctgctgcgtaaagcgtatgaacgcaacgaactggcaccgaataaaccggatgaacgtgaatatgaacgtcgcctgcgcgaatcttatgccggcggttacgttaaggaaccggaaaaaggcctgtgggaaggtctggtgtctctggattttcgctcactgtacccgtcgattatcattacgcataacgtgtccccggacaccctgaatcgtgaaggctgcatggaatatgatgttgctccggaagtcaaacacaagttttgtaaagactttccgggtttcattccgtcactgctgaaacgtctgctggatgaacgccaggaaatcaaacgtcgcatgaaagcctcgaaggatccgattgaaaagaaaatgctggactatcgtcaacgcgcaatcaaaattctggctaatagctattacggctattacggttatgcgaaggcccgctggtactgcaaagaatgtgcggaatctgtcacggcctggggccgtgaatatatcgaatttgtgcgcaaagaactggaagaaaagttcggtttcaaggttctgtacattgatacggacggcctgtacgcaaccatcccgggtgctaaaccggaagaaattaagcgtaaggccctggaatttgtggaatacatcaacgcaaaactgccgggcctgctggaactggaatatgaaggcttctacgttcgcggctttttcgtcacgaagaaaaagtatgcgctgattgacgaagaaggcaaaatcattacccgtggtctggaaatcgttcgtcgcgattggagtgaaattgccaaagaaacccaggcacgtgtcctggaagcaatcctgaaacatggtgatgtggaagaagcggttcgcattgtcaaagaagtgacggaaaagctgtcgaaatatgaagttccgccggaaaaactggtcatccatgaacaaattacccgcgatctgcgtgactacaaagccacgggtccgcacgtggcagttgcaaaacgtctggcagcccgtggcgtgaagattcgtccgggtaccgtgatcagttatattgttctgaaaggctccggtcgcatcggtgaccgtgctattccgtttgatgaattcgacccgacgaaacaccgttacgatgccgaatattacatcgaaaatcaggtcctgccggccgtggaacgcattctgaaagcatttggttatcgcaaggaagatctgcgttaccagaagaccaaacaagtcggcctgggtgcgtggctgaaagtgaaaaagtaa

SEQ ID NO: 182 - DNA, 2331 bp, Artificial Sequence
  Synthetic
atgatcctggacaccgattacattaccgaagatggcaagccggttatccgcattttcaagaaagacaacggcgaatttaagattgaatatgatcgcaactttgaaccgtatatttacgcactgctgcgtgatgacagcgctatcgaagatgttaaaaagattaccgcggaacgtcatggccgcgtggttaaggtgaaacgcgccgaaaaagttaaaaagaaatttctgggtcgtccggtggaagtttggaaactgtatttcacgcgtccgcaggatgtgccggcaatccgtgaccgtattcgtgcacacccggcagtcgtggatatctatgaatacgacattccgtttgcaaaacgctacctgatcgataagggcattatcccgatggaaggtgacgaagaactgaaaatgctggcatttgatattgaaaccctgtatcatgaaggcgaagaattcgctgaaggtccgatcctgatgattagctacgccgatgaaaatgaagcacgcgtcatcacctggaagaaaattgatctgccgtttgtggacgttgtctctacggaaaaggaaatgatcaaacgtttcctgaaggtcattaaggaaaaagatccggacgtgctgattacctataacggcgataattttgacttcgcgtacctgaagaaacgctgcgaaaaatttggtatcaagttcacgctgggccgtgatggtagcgacccgaaaattcagcgtatgggcgaccgctttgccgtcgaagtgaaaggtcgtatccacttcgatctgtatccggtcattctgcgcaccgtgaacctgccgacctatacgctggaagctgtttacgaagcgatctttggcaccccgaaggaaaaagtgtatccggaagaaattaccacggcatgggaaacgggcgaaggtctggaacgtgttgcgcgctactcaatggaagatgccaaagtcacctttgaactgggtcgtgaatttttcccgatggaagcgcagctgtcgcgcctggttggccaatcattttgggatgtctcgcgtagctctacgggtaatctggtggaatggttcctgctgcgtaaagcgtatgaacgcaacgaactggcaccgaataaaccggatgaacgtgaatatgaacgtcgcctgcgcgaatcttatgccggcggttacgttaaggaaccggaaaaaggcctgtgggaaggtctggtgtctctggattttcgctcactgtacccgtcgattatcattacgcataacgtgtccccggacaccctgaatcgtgaaggctgcatggaatatgatgttgctccggaagtcaaacacaagttttgtaaagactttccgggtttcattccgtcactgctgaaacgtctgctggatgaacgccaggaaatcaaacgtcgcatgaaagcctcgaaggatccgattgaaaagaaaatgctggactatcgtcaacgcgcaatcaaaattctggctaatagctattacggctattacggttatgcgaaggcccgctggtactgcaaagaatgtgcggaatctgtcacggcctggggccgtgaatatatcgaatttgtgcgcaaagaactggaagaaaagttcggtttcaaggttctgtacattgatacggacggcctgtacgcaaccatcccgggtgctaaaccggaagaaattaagcgtaaggccctggaatttgtggaatacatcaacgcaaaactgccgggcctgctggaactggaatatgaaggcttctacgttcgcggctttttcgtcacgaagaaaaagtatgcgctgattgacgaagaaggcaaaatcattacccgtggtctggaaatcgttcgtcgcgattggagtgaaattgccaaagaaacccaggcacgtgtgctggaagctctgctgaaagatggcaatgttgaagaagcggtttccattgtcaaagaagtgacggaaaagctgggtaaatatgaagtcccgccggaaaaactggtgatccatgaacaaattacccgcgaactgaaggattacaaagcgacgggcccgcacgttgctatcgcgaaacgtctggcagcgcgtggcgtgaagattcgtccgggtaccgttatcagctatattgtcctgaaaggctctggtcgtatcggtgaccgcgcgattccgtttgatgaattcgacccgacgaaacatcgctacgatgcagaatattacatcgaaaaccaggttctgccggctgtcgaacgtattctgaaagcgtttggctatcgtgccgaagatctgcgctaccagaaaacccgtcaagtgggcctgggtgtttggctgcaaccgaaaggtaagaaataa

SEQ ID NO: 183 - DNA, 2328 bp, Artificial Sequence
  Synthetic
atgatcctggacaccgattacattaccgaagatggcaagccggttatccgcattttcaagaaagacaacggcgaatttaagattgaatatgatcgcaactttgaaccgtatatttacgcactgctgcgtgatgacagcgctatcgaagatgttaaaaagattaccgcggaacgtcatggccgcgtggttaaggtgaaacgcgccgaaaaagttaaaaagaaatttctgggtcgtccggtggaagtttggaaactgtatttcacgcgtccgcaggatgtgccggcaatccgtgaccgtattcgtgcacacccggcagtcgtggatatctatgaatacgacattccgtttgcaaaacgctacctgatcgataagggcattatcccgatggaaggtgacgaagaactgaaaatgctggcatttgatattgaaaccctgtatcatgaaggcgaagaattcgctgaaggtccgatcctgatgattagctacgccgatgaaaatgaagcacgcgtcatcacctggaagaaaattgatctgccgtttgtggacgttgtctctacggaaaaggaaatgatcaaacgtttcctgaaggtcattaaggaaaaagatccggacgtgctgattacctataacggcgataattttgacttcgcgtacctgaagaaacgctgcgaaaaatttggtatcaagttcacgctgggccgtgatggtagcgacccgaaaattcagcgtatgggcgaccgctttgccgtcgaagtgaaaggtcgtatccacttcgatctgtatccggtcattctgcgcaccgtgaacctgccgacctatacgctggaagctgtttacgaagcgatctttggcaccccgaaggaaaaagtgtatccggaagaaattaccacggcatgggaaacgggcgaaggtctggaacgtgttgcgcgctactcaatggaagatgccaaagtcacctttgaactgggtcgtgaatttttcccgatggaagcgcagctgtcgcgcctggttggccaatcattttgggatgtctcgcgtagctctacgggtaatctggtggaatggttcctgctgcgtaaagcgtatgaacgcaacgaactggcaccgaataaaccggatgaacgtgaatatgaacgtcgcctgcgcgaatcttatgccggcggttacgttaaggaaccggaaaaaggcctgtgggaaggtctggtgtctctggattttcgctcactgtacccgtcgattatcattacgcataacgtgtccccggacaccctgaatcgtgaaggctgcatggaatatgatgttgctccggaagtcaaacacaagttttgtaaagactttccgggtttcattccgtcactgctgaaacgtctgctggatgaacgccaggaaatcaaacgtcgcatgaaagcctcgaaggatccgattgaaaagaaaatgctggactatcgtcaacgcgcaatcaaaattctggctaatagctattacggctattacggttatgcgaaggcccgctggtactgcaaagaatgtgcggaatctgtcacggcctggggccgtgaatatatcgaatttgtgcgcaaagaactggaagaaaagttcggtttcaaggttctgtacattgatacggacggcctgtacgcaaccatcccgggtgctaaaccggaagaaattaagcgtaaggccctggaatttgtggaatacatcaacgcaaaactgccgggcctgctggaactggaatatgaaggcttctacgttcgcggctttttcgtcacgaagaaaaagtatgcgctgattgacgaagaaggcaaaatcattacccgtggtctggaaatcgttcgtcgcgattggagtgaaattgccaaagaaacccaggcaaaggttctggaagcaattctgaaacatggtaacgtcgaagaagcggtcaagatcgtgaaagaagttaccgaaaaactgtcgaattatgaaattccggtcgaaaagctggtgatctacgaacaaattacgcgcccgctgaacgaatataaagccattggcccgcacgtggcagttgctaaacgtctggcggccaagggtatcaagattaaaccgggcatggtgattggttatgttgtcctgcgcggcgatggtccgatcagcaaacgtgcgatcgccatcgaagaattcgatggcaaaaagcataagtacgacgcagaatactacatcgaaaatcaggttctgccggccgtcgaacgtatcctgaaagcattcggttataagcgtgaagatctgcgctggcagaagaccaaacaagtgggcctgggtgcgtggctgaaagttaaaaagtcttaa

SEQ ID NO: 184 - DNA, 2331 bp, Artificial Sequence
  Synthetic
atgatcctggacaccgattacattaccgaagatggcaagccggttatccgcattttcaagaaagacaacggcgaatttaagattgaatatgatcgcaactttgaaccgtatatttacgcactgctgcgtgatgacagcgctatcgaagatgttaaaaagattaccgcggaacgtcatggccgcgtggttaaggtgaaacgcgccgaaaaagttaaaaagaaatttctgggtcgtccggtggaagtttggaaactgtatttcacgcgtccgcaggatgtgccggcaatccgtgaccgtattcgtgcacacccggcagtcgtggatatctatgaatacgacattccgtttgcaaaacgctacctgatcgataagggcattatcccgatggaaggtgacgaagaactgaaaatgctggcatttgatattgaaaccctgtatcatgaaggcgaagaattcgctgaaggtccgatcctgatgattagctacgccgatgaaaatgaagcacgcgtcatcacctggaagaaaattgatctgccgtttgtggacgttgtctctacggaaaaggaaatgatcaaacgtttcctgaaggtcattaaggaaaaagatccggacgtgctgattacctataacggcgataattttgacttcgcgtacctgaagaaacgctgcgaaaaatttggtatcaagttcacgctgggccgtgatggtagcgacccgaaaattcagcgtatgggcgaccgctttgccgtcgaagtgaaaggtcgtatccacttcgatctgtatccggtcattctgcgcaccgtgaacctgccgacctatacgctggaagctgtttacgaagcgatctttggcaccccgaaggaaaaagtgtatccggaagaaattaccacggcatgggaaacgggcgaaggtctggaacgtgttgcgcgctactcaatggaagatgccaaagtcacctttgaactgggtcgtgaatttttcccgatggaagcgcagctgtcgcgcctggttggccaatcattttgggatgtctcgcgtagctctacgggtaatctggtggaatggttcctgctgcgtaaagcgtatgaacgcaacgaactggcaccgaataaaccggatgaacgtgaatatgaacgtcgcctgcgcgaatcttatgccggcggttacgttaaggaaccggaaaaaggcctgtgggaaggtctggtgtctctggattttcgctcactgtacccgtcgattatcattacgcataacgtgtccccggacaccctgaatcgtgaaggctgcatggaatatgatgttgctccggaagtcaaacacaagttttgtaaagactttccgggtttcattccgtcactgctgaaacgtctgctggatgaacgccaggaaatcaaacgtcgcatgaaagcctcgaaggatccgattgaaaagaaaatgctggactatcgtcaacgcgcaatcaaaattctggctaatagctattacggctattacggttatgcgaaggcccgctggtactgcaaagaatgtgcggaatctgtcacggcctggggccgtgaatatatcgaatttgtgcgcaaagaactggaagaaaagttcggtttcaaggttctgtacattgatacggacggcctgtacgcaaccatcccgggtgctaaaccggaagaaattaagcgtaaggccctggaatttgtggaatacatcaacgcaaaactgccgggcctgctggaactggaatatgaaggcttctacgttcgcggctttttcgtcacgaagaaaaagtatgcgctgattgacgaagaaggcaaaatcattacccgtggtctggaaatcgttcgtcgcgattggagtgaaattgccaaagaaacccaggcacgtgttctggaagcactgctgaaagatggtaatgtcgaagaagcagtgagtattgttaaagaagtcacggaaaaactgtccaagtatgaagtcccgccggaaaaactggtgattcatgaacaaatcacccgcgaactgaaagattacaaggcgacgggcccgcacgtggcaattgctaaacgtctggcagcgcgtggcgttaagatccgtccgggtaccgttattagctatatcgtcctgaaaggctctggtcgtattggtgaccgcgccatcccgtttgatgaattcgacccggctaaacaccgctacgatgcggaatattacattgaaaatcaggtcctgccggctgtggaacgtatcctgaaagcgtttggctatcgtaaggaagatctgcgctaccagaaaacccgtcaagtgggcctgggtgcgtggctgaaaccgaagggtaaaaagtaa

SEQ ID NO: 185 - DNA, 2331 bp, Artificial Sequence
  Synthetic
atgatcctggacaccgattacattaccgaagatggcaagccggttatccgcattttcaagaaagacaacggcgaatttaagattgaatatgatcgcaactttgaaccgtatatttacgcactgctgcgtgatgacagcgctatcgaagatgttaaaaagattaccgcggaacgtcatggccgcgtggttaaggtgaaacgcgccgaaaaagttaaaaagaaatttctgggtcgtccggtggaagtttggaaactgtatttcacgcgtccgcaggatgtgccggcaatccgtgaccgtattcgtgcacacccggcagtcgtggatatctatgaatacgacattccgtttgcaaaacgctacctgatcgataagggcattatcccgatggaaggtgacgaagaactgaaaatgctggcatttgatattgaaaccctgtatcatgaaggcgaagaattcgctgaaggtccgatcctgatgattagctacgccgatgaaaatgaagcacgcgtcatcacctggaagaaaattgatctgccgtttgtggacgttgtctctacggaaaaggaaatgatcaaacgtttcctgaaggtcattaaggaaaaagatccggacgtgctgattacctataacggcgataattttgacttcgcgtacctgaagaaacgctgcgaaaaatttggtatcaagttcacgctgggccgtgatggtagcgacccgaaaattcagcgtatgggcgaccgctttgccgtcgaagtgaaaggtcgtatccacttcgatctgtatccggtcattctgcgcaccgtgaacctgccgacctatacgctggaagctgtttacgaagcgatctttggcaccccgaaggaaaaagtgtatccggaagaaattaccacggcatgggaaacgggcgaaggtctggaacgtgttgcgcgctactcaatggaagatgccaaagtcacctttgaactgggtcgtgaatttttcccgatggaagcgcagctgtcgcgcctggttggccaatcattttgggatgtctcgcgtagctctacgggtaatctggtggaatggttcctgctgcgtaaagcgtatgaacgcaacgaactggcaccgaataaaccggatgaacgtgaatatgaacgtcgcctgcgcgaatcttatgccggcggttacgttaaggaaccggaaaaaggcctgtgggaaggtctggtgtctctggattttcgctcactgtacccgtcgattatcattacgcataacgtgtccccggacaccctgaatcgtgaaggctgcatggaatatgatgttgctccggaagtcaaacacaagttttgtaaagactttccgggtttcattccgtcactgctgaaacgtctgctggatgaacgccaggaaatcaaacgtcgcatgaaagcctcgaaggatccgattgaaaagaaaatgctggactatcgtcaacgcgcaatcaaaattctggctaatagctattacggctattacggttatgcgaaggcccgctggtactgcaaagaatgtgcggaatctgtcacggcctggggccgtgaatatatcgaatttgtgcgcaaagaactggaagaaaagttcggtttcaaggttctgtacattgatacggacggcctgtacgcaaccatcccgggtgctaaaccggaagaaattaagcgtaaggccctggaatttgtggaatacatcaacgcaaaactgccgggcctgctggaactggaatatgaaggcttctacgttcgcggctttttcgtcacgaagaaaaagtatgcgctgattgacgaagaaggcaaaatcattacccgtggtctggaaatcgttcgtcgcgattggagtgaaattgccaaagaaacccaggcacgcgtcctggaagcaatcctgaaagatggtgacgtggaagaagccgtccgtattgtgaaagaagttacggaaaaactgtccaaatatgaagttccgccggaaaaactggtcatccatgaacaaattacccgcgaactgaaagattacaaagcgacgggcccgcacgtcgcaatcgctaaacgtctggcggcgcgtggcgtgaaaattcgtccgggtaccgtgatctcatatattgttctgaaaggctcgggtcgtatcggtgaccgcgctattccgtttgatgaattcgacccgaaaaaacacaaatacgatgcggaatactacatcgaaaaccaggttctgccggccgtcgaacgtattctgcgcgcatttggctaccgtaaagaagatctgcgttatcaaaaaaccaaacaagtgggtctgggtgcgtggctgaaaccgaaaggtaaaaaataa

SEQ ID NO: 186 - DNA, 2328 bp, Artificial Sequence
  Synthetic
atgatcctggacaccgattacattaccgaagatggcaagccggttatccgcattttcaagaaagacaacggcgaatttaagattgaatatgatcgcaactttgaaccgtatatttacgcactgctgcgtgatgacagcgctatcgaagatgttaaaaagattaccgcggaacgtcatggccgcgtggttaaggtgaaacgcgccgaaaaagttaaaaagaaatttctgggtcgtccggtggaagtttggaaactgtatttcacgcgtccgcaggatgtgccggcaatccgtgaccgtattcgtgcacacccggcagtcgtggatatctatgaatacgacattccgtttgcaaaacgctacctgatcgataagggcattatcccgatggaaggtgacgaagaactgaaaatgctggcatttgatattgaaaccctgtatcatgaaggcgaagaattcgctgaaggtccgatcctgatgattagctacgccgatgaaaatgaagcacgcgtcatcacctggaagaaaattgatctgccgtttgtggacgttgtctctacggaaaaggaaatgatcaaacgtttcctgaaggtcattaaggaaaaagatccggacgtgctgattacctataacggcgataattttgacttcgcgtacctgaagaaacgctgcgaaaaatttggtatcaagttcacgctgggccgtgatggtagcgacccgaaaattcagcgtatgggcgaccgctttgccgtcgaagtgaaaggtcgtatccacttcgatctgtatccggtcattctgcgcaccgtgaacctgccgacctatacgctggaagctgtttacgaagcgatctttggcaccccgaaggaaaaagtgtatccggaagaaattaccacggcatgggaaacgggcgaaggtctggaacgtgttgcgcgctactcaatggaagatgccaaagtcacctttgaactgggtcgtgaatttttcccgatggaagcgcagctgtcgcgcctggttggccaatcattttgggatgtctcgcgtagctctacgggtaatctggtggaatggttcctgctgcgtaaagcgtatgaacgcaacgaactggcaccgaataaaccggatgaacgtgaatatgaacgtcgcctgcgcgaatcttatgccggcggttacgttaaggaaccggaaaaaggcctgtgggaaggtctggtgtctctggattttcgctcactgtacccgtcgattatcattacgcataacgtgtccccggacaccctgaatcgtgaaggctgcatggaatatgatgttgctccggaagtcaaacacaagttttgtaaagactttccgggtttcattccgtcactgctgaaacgtctgctggatgaacgccaggaaatcaaacgtcgcatgaaagcctcgaaggatccgattgaaaagaaaatgctggactatcgtcaacgcgcaatcaaaattctggctaatagctattacggctattacggttatgcgaaggcccgctggtactgcaaagaatgtgcggaatctgtcacggcctggggccgtgaatatatcgaatttgtgcgcaaagaactggaagaaaagttcggtttcaaggttctgtacattgatacggacggcctgtacgcaaccatcccgggtgctaaaccggaagaaattaagcgtaaggccctggaatttgtggaatacatcaacgcaaaactgccgggcctgctggaactggaatatgaaggcttctacgttcgcggctttttcgtcacgaagaaaaagtatgcgctgattgacgaagaaggcaaaatcattacccgtggtctggaaatcgttcgtcgcgattggagtgaaattgccaaagaaacccaggcacgtgttctggaagcaattctgaaacatggtaacgtcgaagaagcggtcaaaatcgtgaaagaagttacggaaaaactgtctaactacgaaattccgccggaaaaactggccatctacgaacaaattacccgcccgctgcatgaatataaagcaatcggtccgcacgtcgcagtggcaaaacgtctggcagcacgcggcgttaaagtcaaaccgggtatggtcatcggctatattgtgctgcgtggtgatggcccgatcagcaaccgcgcaattctggctgaagaatacgatctgaaaaaacacaaatacgacgccgaatattacatcgaaaatcaggttctgccggctgtcctgcgtattctggaagcgtttggctatcgtaaagaagatctgcgctggcagaaaacccgtcaaacgggtctgacctcatggctgaatattaaaaaatcgtaa

SEQ ID NO: 187 - DNA, 2328 bp, Artificial Sequence
  Synthetic
atgatcctggacaccgattacattaccgaagatggcaagccggttatccgcattttcaagaaagacaacggcgaatttaagattgaatatgatcgcaactttgaaccgtatatttacgcactgctgcgtgatgacagcgctatcgaagatgttaaaaagattaccgcggaacgtcatggccgcgtggttaaggtgaaacgcgccgaaaaagttaaaaagaaatttctgggtcgtccggtggaagtttggaaactgtatttcacgcgtccgcaggatgtgccggcaatccgtgaccgtattcgtgcacacccggcagtcgtggatatctatgaatacgacattccgtttgcaaaacgctacctgatcgataagggcattatcccgatggaaggtgacgaagaactgaaaatgctggcatttgatattgaaaccctgtatcatgaaggcgaagaattcgctgaaggtccgatcctgatgattagctacgccgatgaaaatgaagcacgcgtcatcacctggaagaaaattgatctgccgtttgtggacgttgtctctacggaaaaggaaatgatcaaacgtttcctgaaggtcattaaggaaaaagatccggacgtgctgattacctataacggcgataattttgacttcgcgtacctgaagaaacgctgcgaaaaatttggtatcaagttcacgctgggccgtgatggtagcgacccgaaaattcagcgtatgggcgaccgctttgccgtcgaagtgaaaggtcgtatccacttcgatctgtatccggtcattctgcgcaccgtgaacctgccgacctatacgctggaagctgtttacgaagcgatctttggcaccccgaaggaaaaagtgtatccggaagaaattaccacggcatgggaaacgggcgaaggtctggaacgtgttgcgcgctactcaatggaagatgccaaagtcacctttgaactgggtcgtgaatttttcccgatggaagcgcagctgtcgcgcctggttggccaatcattttgggatgtctcgcgtagctctacgggtaatctggtggaatggttcctgctgcgtaaagcgtatgaacgcaacgaactggcaccgaataaaccggatgaacgtgaatatgaacgtcgcctgcgcgaatcttatgccggcggttacgttaaggaaccggaaaaaggcctgtgggaaggtctggtgtctctggattttcgctcactgtacccgtcgattatcattacgcataacgtgtccccggacaccctgaatcgtgaaggctgcatggaatatgatgttgctccggaagtcaaacacaagttttgtaaagactttccgggtttcattccgtcactgctgaaacgtctgctggatgaacgccaggaaatcaaacgtcgcatgaaagcctcgaaggatccgattgaaaagaaaatgctggactatcgtcaacgcgcaatcaaaattctggctaatagctattacggctattacggttatgcgaaggcccgctggtactgcaaagaatgtgcggaatctgtcacggcctggggccgtgaatatatcgaatttgtgcgcaaagaactggaagaaaagttcggtttcaaggttctgtacattgatacggacggcctgtacgcaaccatcccgggtgctaaaccggaagaaattaagcgtaaggccctggaatttgtggaatacatcaacgcaaaactgccgggcctgctggaactggaatatgaaggcttctacgttcgcggctttttcgtcacgaagaaaaagtatgcgctgattgacgaagaaggcaaaatcattacccgtggtctggaaatcgttcgtcgcgattggagtgaaattgccaaagaaacccaggcaaaagttctggaagcaatcctgaaacatggtaatgtcgaagaagcagtgaaaattgtcaaggaagtgacggaaaaactgtcgaagtatgaaatcccgccggaaaaactggtgatctacgaacaaattacccgcccgctgcatgaatataaagcgattggcccgcacgtggcagttgctaaacgtctggcagcccgcggtgtcaaagtgcgtccgggcatggtgatcggttatattgttctgcgtggcgatggtccgatcagtaaacgcgcgattctggccgaagaatttgatccgcgcaaacacaagtacgacgccgaatattacatcgaaaaccaggtgctgccggctgttctgcgtattctggaagcgttcggctatcgtaaagaagatctgcgctggcagaaaaccaagcaaacgggtctgaccgcatggctgaatgtgaaaaagaaataa

SEQ ID NO: 188 - DNA, 2331 bp, Artificial Sequence
  Synthetic
atgatcctggacaccgattacattaccgaagatggcaagccggttatccgcattttcaagaaagacaacggcgaatttaagattgaatatgatcgcaactttgaaccgtatatttacgcactgctgcgtgatgacagcgctatcgaagatgttaaaaagattaccgcggaacgtcatggccgcgtggttaaggtgaaacgcgccgaaaaagttaaaaagaaatttctgggtcgtccggtggaagtttggaaactgtatttcacgcgtccgcaggatgtgccggcaatccgtgaccgtattcgtgcacacccggcagtcgtggatatctatgaatacgacattccgtttgcaaaacgctacctgatcgataagggcattatcccgatggaaggtgacgaagaactgaaaatgctggcatttgatattgaaaccctgtatcatgaaggcgaagaattcgctgaaggtccgatcctgatgattagctacgccgatgaaaatgaagcacgcgtcatcacctggaagaaaattgatctgccgtttgtggacgttgtctctacggaaaaggaaatgatcaaacgtttcctgaaggtcattaaggaaaaagatccggacgtgctgattacctataacggcgataattttgacttcgcgtacctgaagaaacgctgcgaaaaatttggtatcaagttcacgctgggccgtgatggtagcgacccgaaaattcagcgtatgggcgaccgctttgccgtcgaagtgaaaggtcgtatccacttcgatctgtatccggtcattctgcgcaccgtgaacctgccgacctatacgctggaagctgtttacgaagcgatctttggcaccccgaaggaaaaagtgtatccggaagaaattaccacggcatgggaaacgggcgaaggtctggaacgtgttgcgcgctactcaatggaagatgccaaagtcacctttgaactgggtcgtgaatttttcccgatggaagcgcagctgtcgcgcctggttggccaatcattttgggatgtctcgcgtagctctacgggtaatctggtggaatggttcctgctgcgtaaagcgtatgaacgcaacgaagtggcaccgaataaaccggatgaacgtgaatatcagcgtcgcctgcgcgaaagttatgcaggcggttacgtgaaagaaccggaaaaaggtctgtgggaaggcctggtttatctggattttcgtgcgctgtacccgagcattatcattacgcataacgtttctccggacaccctgaatcgtgaaggctgccgcgaatatgatattgcgccggaagtgggtcacaaattttgtaaagatatcccgggcttcattccgagcctgctgaaacgtctgctggaagaacgccagaaaatcaaaacgaaaatgaaagaaacccaagatccgatcgaaaaaattctgctggactaccgtcagcgcgcgatcaaaattctggccaacagttattacggttattacggctatgcaaaagctcgctggtactgcaaagaatgtgcagaatccgttaccgcttggggtcgtaaatacatcgaattcgtctggaaagaactggaagaaaaattcggtttcaaagttctgtacatcgatacggacggtctgtacgcaaccatcccgggcggtaaaccggaagaaattaagaaaaaagccctggaatttgtggattacattaatgcaaaactgccgggcctgctggaactggaatatgaaggtttctacgtgcgtggctttttcgttaccaagaaaaaatatgccgtcattgacgaagaaggtaaagtgatcacccgcggcctggaaattgttcgtcgcgattggagtgaaattgccaaagaaacccaggcacgcgttctggaagcaatcctgcgtcatggtgacgtcgaagaagccgttcgcattgtcaaagatgtgacggaaaagctgtcgaaatatgaagtcccgccggaaaaactggtgatccatgaacaaattacccgtgaactgaaggattacaaagcgacgggcccgcacgttgcaattgctaaacgcctggcagcccgtggcatcaagattcgtccgggtaccgttatcagctatattgtcctgaaaggctctggtcgcatcggtgatcgtgctattccgtttgatgaattcgacccgacgaaacaccgttacgatgccgaatattacatcgaaaatcaggtgctgccggccgttgaacgcattctgaaagcatttggctataagaaagaagaactgcgctaccagaaaacccgtcaagtgggcctgggtgcgtggctgaagctgaaaggtaagaaataa

SEQ ID NO: 189 - DNA, 2325 bp, Artificial Sequence
  Synthetic
atgatcctggacaccgattacattaccgaagatggcaagccggttatccgcattttcaagaaagacaacggcgaatttaagattgaatatgatcgcaactttgaaccgtatatttacgcactgctgcgtgatgacagcgctatcgaagatgttaaaaagattaccgcggaacgtcatggccgcgtggttaaggtgaaacgcgccgaaaaagttaaaaagaaatttctgggtcgtccggtggaagtttggaaactgtatttcacgcgtccgcaggatgtgccggcaatccgtgaccgtattcgtgcacacccggcagtcgtggatatctatgaatacgacattccgtttgcaaaacgctacctgatcgataagggcattatcccgatggaaggtgacgaagaactgaaaatgctggcatttgatattgaaaccctgtatcatgaaggcgaagaattcgctgaaggtccgatcctgatgattagctacgccgatgaaaatgaagcacgcgtcatcacctggaagaaaattgatctgccgtttgtggacgttgtctctacggaaaaggaaatgatcaaacgtttcctgaaggtcattaaggaaaaagatccggacgtgctgattacctataacggcgataattttgacttcgcgtacctgaagaaacgctgcgaaaaatttggtatcaagttcacgctgggccgtgatggtagcgacccgaaaattcagcgtatgggcgaccgctttgccgtcgaagtgaaaggtcgtatccacttcgatctgtatccggtcattctgcgcaccgtgaacctgccgacctatacgctggaagctgtttacgaagcgatctttggcaccccgaaggaaaaagtgtatccggaagaaattaccacggcatgggaaacgggcgaaggtctggaacgtgttgcgcgctactcaatggaagatgccaaagtcacctttgaactgggtcgtgaatttttcccgatggaagcgcagctgtcgcgcctggttggccaatcattttgggatgtctcgcgtagctctacgggtaatctggtggaatggttcctgctgcgtaaagcgtatgaacgcaacgaagtggcaccgaataaaccggatgaacgtgaatatcagcgtcgcctgcgcgaaagttatgcaggcggttacgtgaaagaaccggaaaaaggtctgtgggaaggcctggtttatctggattttcgtgcgctgtacccgagcattatcattacgcataacgtttctccggacaccctgaatcgtgaaggctgccgcgaatatgatattgcgccggaagtgggtcacaaattttgtaaagatatcccgggcttcattccgagcctgctgaaacgtctgctggaagaacgccagaaaatcaaaacgaaaatgaaagaaacccaagatccgatcgaaaaaattctgctggactaccgtcagcgcgcgatcaaaattctggccaacagttattacggttattacggctatgcaaaagctcgctggtactgcaaagaatgtgcagaatccgttaccgcttggggtcgtaaatacatcgaattcgtctggaaagaactggaagaaaaattcggtttcaaagttctgtacatcgatacggacggtctgtacgcaaccatcccgggcggtaaaccggaagaaattaagaaaaaagccctggaatttgtggattacattaatgcaaaactgccgggcctgctggaactggaatatgaaggtttctacgtgcgtggctttttcgttaccaagaaaaaatatgccgtcattgacgaagaaggtaaagtgatcacccgcggcctggaaattgttcgtcgcgattggagtgaaattgccaaagaaacccaggcacgtgtcctggaagcaatcctgaaacatggtgatgtggaagaagcggttcgcattgtcaaagaagtgacggaaaagctgtcgaaatatgaagttccgccggaaaaactggtcatccatgaacaaattacccgcgatctgcgtgactacaaagccacgggtccgcacgtggcagttgcaaaacgtctggcagcccgtggcgtgaagattcgtccgggtaccgtgatcagttatattgttctgaaaggctccggtcgcatcggtgaccgtgctattccgtttgatgaattcgacccgacgaaacaccgttacgatgccgaatattacatcgaaaatcaggtcctgccggccgtggaacgcattctgaaagcatttggttatcgcaaggaagatctgcgttaccagaagaccaaacaagtcggcctgggtgcgtggctgaaagtgaaaaagtaa

SEQ ID NO: 190 - DNA, 2331 bp, Artificial Sequence
  Synthetic
atgatcctggacaccgattacattaccgaagatggcaagccggttatccgcattttcaagaaagacaacggcgaatttaagattgaatatgatcgcaactttgaaccgtatatttacgcactgctgcgtgatgacagcgctatcgaagatgttaaaaagattaccgcggaacgtcatggccgcgtggttaaggtgaaacgcgccgaaaaagttaaaaagaaatttctgggtcgtccggtggaagtttggaaactgtatttcacgcgtccgcaggatgtgccggcaatccgtgaccgtattcgtgcacacccggcagtcgtggatatctatgaatacgacattccgtttgcaaaacgctacctgatcgataagggcattatcccgatggaaggtgacgaagaactgaaaatgctggcatttgatattgaaaccctgtatcatgaaggcgaagaattcgctgaaggtccgatcctgatgattagctacgccgatgaaaatgaagcacgcgtcatcacctggaagaaaattgatctgccgtttgtggacgttgtctctacggaaaaggaaatgatcaaacgtttcctgaaggtcattaaggaaaaagatccggacgtgctgattacctataacggcgataattttgacttcgcgtacctgaagaaacgctgcgaaaaatttggtatcaagttcacgctgggccgtgatggtagcgacccgaaaattcagcgtatgggcgaccgctttgccgtcgaagtgaaaggtcgtatccacttcgatctgtatccggtcattctgcgcaccgtgaacctgccgacctatacgctggaagctgtttacgaagcgatctttggcaccccgaaggaaaaagtgtatccggaagaaattaccacggcatgggaaacgggcgaaggtctggaacgtgttgcgcgctactcaatggaagatgccaaagtcacctttgaactgggtcgtgaatttttcccgatggaagcgcagctgtcgcgcctggttggccaatcattttgggatgtctcgcgtagctctacgggtaatctggtggaatggttcctgctgcgtaaagcgtatgaacgcaacgaagtggcaccgaataaaccggatgaacgtgaatatcagcgtcgcctgcgcgaaagttatgcaggcggttacgtgaaagaaccggaaaaaggtctgtgggaaggcctggtttatctggattttcgtgcgctgtacccgagcattatcattacgcataacgtttctccggacaccctgaatcgtgaaggctgccgcgaatatgatattgcgccggaagtgggtcacaaattttgtaaagatatcccgggcttcattccgagcctgctgaaacgtctgctggaagaacgccagaaaatcaaaacgaaaatgaaagaaacccaagatccgatcgaaaaaattctgctggactaccgtcagcgcgcgatcaaaattctggccaacagttattacggttattacggctatgcaaaagctcgctggtactgcaaagaatgtgcagaatccgttaccgcttggggtcgtaaatacatcgaattcgtctggaaagaactggaagaaaaattcggtttcaaagttctgtacatcgatacggacggtctgtacgcaaccatcccgggcggtaaaccggaagaaattaagaaaaaagccctggaatttgtggattacattaatgcaaaactgccgggcctgctggaactggaatatgaaggtttctacgtgcgtggctttttcgttaccaagaaaaaatatgccgtcattgacgaagaaggtaaagtgatcacccgcggcctggaaattgttcgtcgcgattggagtgaaattgccaaagaaacccaggcacgtgtgctggaagctctgctgaaagatggcaatgttgaagaagcggtttccattgtcaaagaagtgacggaaaagctgggtaaatatgaagtcccgccggaaaaactggtgatccatgaacaaattacccgcgaactgaaggattacaaagcgacgggcccgcacgttgctatcgcgaaacgtctggcagcgcgtggcgtgaagattcgtccgggtaccgttatcagctatattgtcctgaaaggctctggtcgtatcggtgaccgcgcgattccgtttgatgaattcgacccgacgaaacatcgctacgatgcagaatattacatcgaaaaccaggttctgccggctgtcgaacgtattctgaaagcgtttggctatcgtgccgaagatctgcgctaccagaaaacccgtcaagtgggcctgggtgtttggctgcaaccgaaaggtaagaaataa

SEQ ID NO: 191 - DNA, 2328 bp, Artificial Sequence
  Synthetic
atgatcctggacaccgattacattaccgaagatggcaagccggttatccgcattttcaagaaagacaacggcgaatttaagattgaatatgatcgcaactttgaaccgtatatttacgcactgctgcgtgatgacagcgctatcgaagatgttaaaaagattaccgcggaacgtcatggccgcgtggttaaggtgaaacgcgccgaaaaagttaaaaagaaatttctgggtcgtccggtggaagtttggaaactgtatttcacgcgtccgcaggatgtgccggcaatccgtgaccgtattcgtgcacacccggcagtcgtggatatctatgaatacgacattccgtttgcaaaacgctacctgatcgataagggcattatcccgatggaaggtgacgaagaactgaaaatgctggcatttgatattgaaaccctgtatcatgaaggcgaagaattcgctgaaggtccgatcctgatgattagctacgccgatgaaaatgaagcacgcgtcatcacctggaagaaaattgatctgccgtttgtggacgttgtctctacggaaaaggaaatgatcaaacgtttcctgaaggtcattaaggaaaaagatccggacgtgctgattacctataacggcgataattttgacttcgcgtacctgaagaaacgctgcgaaaaatttggtatcaagttcacgctgggccgtgatggtagcgacccgaaaattcagcgtatgggcgaccgctttgccgtcgaagtgaaaggtcgtatccacttcgatctgtatccggtcattctgcgcaccgtgaacctgccgacctatacgctggaagctgtttacgaagcgatctttggcaccccgaaggaaaaagtgtatccggaagaaattaccacggcatgggaaacgggcgaaggtctggaacgtgttgcgcgctactcaatggaagatgccaaagtcacctttgaactgggtcgtgaatttttcccgatggaagcgcagctgtcgcgcctggttggccaatcattttgggatgtctcgcgtagctctacgggtaatctggtggaatggttcctgctgcgtaaagcgtatgaacgcaacgaagtggcaccgaataaaccggatgaacgtgaatatcagcgtcgcctgcgcgaaagttatgcaggcggttacgtgaaagaaccggaaaaaggtctgtgggaaggcctggtttatctggattttcgtgcgctgtacccgagcattatcattacgcataacgtttctccggacaccctgaatcgtgaaggctgccgcgaatatgatattgcgccggaagtgggtcacaaattttgtaaagatatcccgggcttcattccgagcctgctgaaacgtctgctggaagaacgccagaaaatcaaaacgaaaatgaaagaaacccaagatccgatcgaaaaaattctgctggactaccgtcagcgcgcgatcaaaattctggccaacagttattacggttattacggctatgcaaaagctcgctggtactgcaaagaatgtgcagaatccgttaccgcttggggtcgtaaatacatcgaattcgtctggaaagaactggaagaaaaattcggtttcaaagttctgtacatcgatacggacggtctgtacgcaaccatcccgggcggtaaaccggaagaaattaagaaaaaagccctggaatttgtggattacattaatgcaaaactgccgggcctgctggaactggaatatgaaggtttctacgtgcgtggctttttcgttaccaagaaaaaatatgccgtcattgacgaagaaggtaaagtgatcacccgcggcctggaaattgttcgtcgcgattggagtgaaattgccaaagaaacccaggcaaaggttctggaagcaattctgaaacatggtaacgtcgaagaagcggtcaagatcgtgaaagaagttaccgaaaaactgtcgaattatgaaattccggtcgaaaagctggtgatctacgaacaaattacgcgcccgctgaacgaatataaagccattggcccgcacgtggcagttgctaaacgtctggcggccaagggtatcaagattaaaccgggcatggtgattggttatgttgtcctgcgcggcgatggtccgatcagcaaacgtgcgatcgccatcgaagaattcgatggcaaaaagcataagtacgacgcagaatactacatcgaaaatcaggttctgccggccgtcgaacgtatcctgaaagcattcggttataagcgtgaagatctgcgctggcagaagaccaaacaagtgggcctgggtgcgtggctgaaagttaaaaagtcttaa

SEQ ID NO: 192 - DNA, 2331 bp, Artificial Sequence
  Synthetic
atgatcctggacaccgattacattaccgaagatggcaagccggttatccgcattttcaagaaagacaacggcgaatttaagattgaatatgatcgcaactttgaaccgtatatttacgcactgctgcgtgatgacagcgctatcgaagatgttaaaaagattaccgcggaacgtcatggccgcgtggttaaggtgaaacgcgccgaaaaagttaaaaagaaatttctgggtcgtccggtggaagtttggaaactgtatttcacgcgtccgcaggatgtgccggcaatccgtgaccgtattcgtgcacacccggcagtcgtggatatctatgaatacgacattccgtttgcaaaacgctacctgatcgataagggcattatcccgatggaaggtgacgaagaactgaaaatgctggcatttgatattgaaaccctgtatcatgaaggcgaagaattcgctgaaggtccgatcctgatgattagctacgccgatgaaaatgaagcacgcgtcatcacctggaagaaaattgatctgccgtttgtggacgttgtctctacggaaaaggaaatgatcaaacgtttcctgaaggtcattaaggaaaaagatccggacgtgctgattacctataacggcgataattttgacttcgcgtacctgaagaaacgctgcgaaaaatttggtatcaagttcacgctgggccgtgatggtagcgacccgaaaattcagcgtatgggcgaccgctttgccgtcgaagtgaaaggtcgtatccacttcgatctgtatccggtcattctgcgcaccgtgaacctgccgacctatacgctggaagctgtttacgaagcgatctttggcaccccgaaggaaaaagtgtatccggaagaaattaccacggcatgggaaacgggcgaaggtctggaacgtgttgcgcgctactcaatggaagatgccaaagtcacctttgaactgggtcgtgaatttttcccgatggaagcgcagctgtcgcgcctggttggccaatcattttgggatgtctcgcgtagctctacgggtaatctggtggaatggttcctgctgcgtaaagcgtatgaacgcaacgaagtggcaccgaataaaccggatgaacgtgaatatcagcgtcgcctgcgcgaaagttatgcaggcggttacgtgaaagaaccggaaaaaggtctgtgggaaggcctggtttatctggattttcgtgcgctgtacccgagcattatcattacgcataacgtttctccggacaccctgaatcgtgaaggctgccgcgaatatgatattgcgccggaagtgggtcacaaattttgtaaagatatcccgggcttcattccgagcctgctgaaacgtctgctggaagaacgccagaaaatcaaaacgaaaatgaaagaaacccaagatccgatcgaaaaaattctgctggactaccgtcagcgcgcgatcaaaattctggccaacagttattacggttattacggctatgcaaaagctcgctggtactgcaaagaatgtgcagaatccgttaccgcttggggtcgtaaatacatcgaattcgtctggaaagaactggaagaaaaattcggtttcaaagttctgtacatcgatacggacggtctgtacgcaaccatcccgggcggtaaaccggaagaaattaagaaaaaagccctggaatttgtggattacattaatgcaaaactgccgggcctgctggaactggaatatgaaggtttctacgtgcgtggctttttcgttaccaagaaaaaatatgccgtcattgacgaagaaggtaaagtgatcacccgcggcctggaaattgttcgtcgcgattggagtgaaattgccaaagaaacccaggcacgtgttctggaagcactgctgaaagatggtaatgtcgaagaagcagtgagtattgttaaagaagtcacggaaaaactgtccaagtatgaagtcccgccggaaaaactggtgattcatgaacaaatcacccgcgaactgaaagattacaaggcgacgggcccgcacgtggcaattgctaaacgtctggcagcgcgtggcgttaagatccgtccgggtaccgttattagctatatcgtcctgaaaggctctggtcgtattggtgaccgcgccatcccgtttgatgaattcgacccggctaaacaccgctacgatgcggaatattacattgaaaatcaggtcctgccggctgtggaacgtatcctgaaagcgtttggctatcgtaaggaagatctgcgctaccagaaaacccgtcaagtgggcctgggtgcgtggctgaaaccgaagggtaaaaagtaa

SEQ ID NO: 193 - DNA, 2331 bp, Artificial Sequence
  Synthetic
atgatcctggacaccgattacattaccgaagatggcaagccggttatccgcattttcaagaaagacaacggcgaatttaagattgaatatgatcgcaactttgaaccgtatatttacgcactgctgcgtgatgacagcgctatcgaagatgttaaaaagattaccgcggaacgtcatggccgcgtggttaaggtgaaacgcgccgaaaaagttaaaaagaaatttctgggtcgtccggtggaagtttggaaactgtatttcacgcgtccgcaggatgtgccggcaatccgtgaccgtattcgtgcacacccggcagtcgtggatatctatgaatacgacattccgtttgcaaaacgctacctgatcgataagggcattatcccgatggaaggtgacgaagaactgaaaatgctggcatttgatattgaaaccctgtatcatgaaggcgaagaattcgctgaaggtccgatcctgatgattagctacgccgatgaaaatgaagcacgcgtcatcacctggaagaaaattgatctgccgtttgtggacgttgtctctacggaaaaggaaatgatcaaacgtttcctgaaggtcattaaggaaaaagatccggacgtgctgattacctataacggcgataattttgacttcgcgtacctgaagaaacgctgcgaaaaatttggtatcaagttcacgctgggccgtgatggtagcgacccgaaaattcagcgtatgggcgaccgctttgccgtcgaagtgaaaggtcgtatccacttcgatctgtatccggtcattctgcgcaccgtgaacctgccgacctatacgctggaagctgtttacgaagcgatctttggcaccccgaaggaaaaagtgtatccggaagaaattaccacggcatgggaaacgggcgaaggtctggaacgtgttgcgcgctactcaatggaagatgccaaagtcacctttgaactgggtcgtgaatttttcccgatggaagcgcagctgtcgcgcctggttggccaatcattttgggatgtctcgcgtagctctacgggtaatctggtggaatggttcctgctgcgtaaagcgtatgaacgcaacgaagtggcaccgaataaaccggatgaacgtgaatatcagcgtcgcctgcgcgaaagttatgcaggcggttacgtgaaagaaccggaaaaaggtctgtgggaaggcctggtttatctggattttcgtgcgctgtacccgagcattatcattacgcataacgtttctccggacaccctgaatcgtgaaggctgccgcgaatatgatattgcgccggaagtgggtcacaaattttgtaaagatatcccgggcttcattccgagcctgctgaaacgtctgctggaagaacgccagaaaatcaaaacgaaaatgaaagaaacccaagatccgatcgaaaaaattctgctggactaccgtcagcgcgcgatcaaaattctggccaacagttattacggttattacggctatgcaaaagctcgctggtactgcaaagaatgtgcagaatccgttaccgcttggggtcgtaaatacatcgaattcgtctggaaagaactggaagaaaaattcggtttcaaagttctgtacatcgatacggacggtctgtacgcaaccatcccgggcggtaaaccggaagaaattaagaaaaaagccctggaatttgtggattacattaatgcaaaactgccgggcctgctggaactggaatatgaaggtttctacgtgcgtggctttttcgttaccaagaaaaaatatgccgtcattgacgaagaaggtaaagtgatcacccgcggcctggaaattgttcgtcgcgattggagtgaaattgccaaagaaacccaggcacgcgtcctggaagcaatcctgaaagatggtgacgtggaagaagccgtccgtattgtgaaagaagttacggaaaaactgtccaaatatgaagttccgccggaaaaactggtcatccatgaacaaattacccgcgaactgaaagattacaaagcgacgggcccgcacgtcgcaatcgctaaacgtctggcggcgcgtggcgtgaaaattcgtccgggtaccgtgatctcatatattgttctgaaaggctcgggtcgtatcggtgaccgcgctattccgtttgatgaattcgacccgaaaaaacacaaatacgatgcggaatactacatcgaaaaccaggttctgccggccgtcgaacgtattctgcgcgcatttggctaccgtaaagaagatctgcgttatcaaaaaaccaaacaagtgggtctgggtgcgtggctgaaaccgaaaggtaaaaaataa

SEQ ID NO: 194 - DNA, 2328 bp, Artificial Sequence
  Synthetic
atgatcctggacaccgattacattaccgaagatggcaagccggttatccgcattttcaagaaagacaacggcgaatttaagattgaatatgatcgcaactttgaaccgtatatttacgcactgctgcgtgatgacagcgctatcgaagatgttaaaaagattaccgcggaacgtcatggccgcgtggttaaggtgaaacgcgccgaaaaagttaaaaagaaatttctgggtcgtccggtggaagtttggaaactgtatttcacgcgtccgcaggatgtgccggcaatccgtgaccgtattcgtgcacacccggcagtcgtggatatctatgaatacgacattccgtttgcaaaacgctacctgatcgataagggcattatcccgatggaaggtgacgaagaactgaaaatgctggcatttgatattgaaaccctgtatcatgaaggcgaagaattcgctgaaggtccgatcctgatgattagctacgccgatgaaaatgaagcacgcgtcatcacctggaagaaaattgatctgccgtttgtggacgttgtctctacggaaaaggaaatgatcaaacgtttcctgaaggtcattaaggaaaaagatccggacgtgctgattacctataacggcgataattttgacttcgcgtacctgaagaaacgctgcgaaaaatttggtatcaagttcacgctgggccgtgatggtagcgacccgaaaattcagcgtatgggcgaccgctttgccgtcgaagtgaaaggtcgtatccacttcgatctgtatccggtcattctgcgcaccgtgaacctgccgacctatacgctggaagctgtttacgaagcgatctttggcaccccgaaggaaaaagtgtatccggaagaaattaccacggcatgggaaacgggcgaaggtctggaacgtgttgcgcgctactcaatggaagatgccaaagtcacctttgaactgggtcgtgaatttttcccgatggaagcgcagctgtcgcgcctggttggccaatcattttgggatgtctcgcgtagctctacgggtaatctggtggaatggttcctgctgcgtaaagcgtatgaacgcaacgaagtggcaccgaataaaccggatgaacgtgaatatcagcgtcgcctgcgcgaaagttatgcaggcggttacgtgaaagaaccggaaaaaggtctgtgggaaggcctggtttatctggattttcgtgcgctgtacccgagcattatcattacgcataacgtttctccggacaccctgaatcgtgaaggctgccgcgaatatgatattgcgccggaagtgggtcacaaattttgtaaagatatcccgggcttcattccgagcctgctgaaacgtctgctggaagaacgccagaaaatcaaaacgaaaatgaaagaaacccaagatccgatcgaaaaaattctgctggactaccgtcagcgcgcgatcaaaattctggccaacagttattacggttattacggctatgcaaaagctcgctggtactgcaaagaatgtgcagaatccgttaccgcttggggtcgtaaatacatcgaattcgtctggaaagaactggaagaaaaattcggtttcaaagttctgtacatcgatacggacggtctgtacgcaaccatcccgggcggtaaaccggaagaaattaagaaaaaagccctggaatttgtggattacattaatgcaaaactgccgggcctgctggaactggaatatgaaggtttctacgtgcgtggctttttcgttaccaagaaaaaatatgccgtcattgacgaagaaggtaaagtgatcacccgcggcctggaaattgttcgtcgcgattggagtgaaattgccaaagaaacccaggcacgtgttctggaagcaattctgaaacatggtaacgtcgaagaagcggtcaaaatcgtgaaagaagttacggaaaaactgtctaactacgaaattccgccggaaaaactggccatctacgaacaaattacccgcccgctgcatgaatataaagcaatcggtccgcacgtcgcagtggcaaaacgtctggcagcacgcggcgttaaagtcaaaccgggtatggtcatcggctatattgtgctgcgtggtgatggcccgatcagcaaccgcgcaattctggctgaagaatacgatctgaaaaaacacaaatacgacgccgaatattacatcgaaaatcaggttctgccggctgtcctgcgtattctggaagcgtttggctatcgtaaagaagatctgcgctggcagaaaacccgtcaaacgggtctgacctcatggctgaatattaaaaaatcgtaa

SEQ ID NO: 195 - DNA, 2328 bp, Artificial Sequence
  Synthetic
atgatcctggacaccgattacattaccgaagatggcaagccggttatccgcattttcaagaaagacaacggcgaatttaagattgaatatgatcgcaactttgaaccgtatatttacgcactgctgcgtgatgacagcgctatcgaagatgttaaaaagattaccgcggaacgtcatggccgcgtggttaaggtgaaacgcgccgaaaaagttaaaaagaaatttctgggtcgtccggtggaagtttggaaactgtatttcacgcgtccgcaggatgtgccggcaatccgtgaccgtattcgtgcacacccggcagtcgtggatatctatgaatacgacattccgtttgcaaaacgctacctgatcgataagggcattatcccgatggaaggtgacgaagaactgaaaatgctggcatttgatattgaaaccctgtatcatgaaggcgaagaattcgctgaaggtccgatcctgatgattagctacgccgatgaaaatgaagcacgcgtcatcacctggaagaaaattgatctgccgtttgtggacgttgtctctacggaaaaggaaatgatcaaacgtttcctgaaggtcattaaggaaaaagatccggacgtgctgattacctataacggcgataattttgacttcgcgtacctgaagaaacgctgcgaaaaatttggtatcaagttcacgctgggccgtgatggtagcgacccgaaaattcagcgtatgggcgaccgctttgccgtcgaagtgaaaggtcgtatccacttcgatctgtatccggtcattctgcgcaccgtgaacctgccgacctatacgctggaagctgtttacgaagcgatctttggcaccccgaaggaaaaagtgtatccggaagaaattaccacggcatgggaaacgggcgaaggtctggaacgtgttgcgcgctactcaatggaagatgccaaagtcacctttgaactgggtcgtgaatttttcccgatggaagcgcagctgtcgcgcctggttggccaatcattttgggatgtctcgcgtagctctacgggtaatctggtggaatggttcctgctgcgtaaagcgtatgaacgcaacgaagtggcaccgaataaaccggatgaacgtgaatatcagcgtcgcctgcgcgaaagttatgcaggcggttacgtgaaagaaccggaaaaaggtctgtgggaaggcctggtttatctggattttcgtgcgctgtacccgagcattatcattacgcataacgtttctccggacaccctgaatcgtgaaggctgccgcgaatatgatattgcgccggaagtgggtcacaaattttgtaaagatatcccgggcttcattccgagcctgctgaaacgtctgctggaagaacgccagaaaatcaaaacgaaaatgaaagaaacccaagatccgatcgaaaaaattctgctggactaccgtcagcgcgcgatcaaaattctggccaacagttattacggttattacggctatgcaaaagctcgctggtactgcaaagaatgtgcagaatccgttaccgcttggggtcgtaaatacatcgaattcgtctggaaagaactggaagaaaaattcggtttcaaagttctgtacatcgatacggacggtctgtacgcaaccatcccgggcggtaaaccggaagaaattaagaaaaaagccctggaatttgtggattacattaatgcaaaactgccgggcctgctggaactggaatatgaaggtttctacgtgcgtggctttttcgttaccaagaaaaaatatgccgtcattgacgaagaaggtaaagtgatcacccgcggcctggaaattgttcgtcgcgattggagtgaaattgccaaagaaacccaggcaaaagttctggaagcaatcctgaaacatggtaatgtcgaagaagcagtgaaaattgtcaaggaagtgacggaaaaactgtcgaagtatgaaatcccgccggaaaaactggtgatctacgaacaaattacccgcccgctgcatgaatataaagcgattggcccgcacgtggcagttgctaaacgtctggcagcccgcggtgtcaaagtgcgtccgggcatggtgatcggttatattgttctgcgtggcgatggtccgatcagtaaacgcgcgattctggccgaagaatttgatccgcgcaaacacaagtacgacgccgaatattacatcgaaaaccaggtgctgccggctgttctgcgtattctggaagcgttcggctatcgtaaagaagatctgcgctggcagaaaaccaagcaaacgggtctgaccgcatggctgaatgtgaaaaagaaataa

SEQ ID NO: 196 - DNA, 2328 bp, Artificial Sequence
  Synthetic
atgatcctggacaccgattacattaccgaagatggcaagccggttatccgcattttcaagaaagacaacggcgaatttaagattgaatatgatcgcaactttgaaccgtatatttacgcactgctgcgtgatgacagcgctatcgaagatgttaaaaagattaccgcggaacgtcatggccgcgtggttaaggtgaaacgcgccgaaaaagttaaaaagaaatttctgggtcgtccggtggaagtttggaaactgtatttcacgcgtccgcaggatgtgccggcaatccgtgaccgtattcgtgcacacccggcagtcgtggatatctatgaatacgacattccgtttgcaaaacgctacctgatcgataagggcattatcccgatggaaggtgacgaagaactgaaaatgctggcatttgatattgaaaccctgtatcatgaaggcgaagaattcgctgaaggtccgatcctgatgattagctacgccgatgaaaatgaagcacgcgtcatcacctggaagaaaattgatctgccgtttgtggacgttgtctctacggaaaaggaaatgatcaaacgtttcctgaaggtcattaaggaaaaagatccggacgtgctgattacctataacggcgataattttgacttcgcgtacctgaagaaacgctgcgaaaaatttggtatcaagttcacgctgggccgtgatggtagcgacccgaaaattcagcgtatgggcgaccgctttgccgtcgaagtgaaaggtcgtatccacttcgatctgtatccggtcattctgcgcaccgtgaacctgccgacctatacgctggaagctgtttacgaagcgatctttggcaccccgaaggaaaaagtgtatccggaagaaattaccacggcatgggaaacgggcgaaggtctggaacgtgttgcgcgctactcaatggaagatgccaaagtcacctttgaactgggtcgtgaatttttcccgatggaagcgcagctgtcgcgcctggttggccaatcattttgggatgtctcgcgtagctctacgggtaatctggtggaatggttcctgctgcgtaaagcgtatgaacgcaacgaactggcgccgaataaaccggatgaaaaggaactggcacgtcgccgtggcggttatgcaggcggttacgtcaaagaaccggaacgtggcctgtgggataatattgtgtatctggactttcgcagtctgtacccgtccattatcattacccataacgttagtccggacacgctgaatcgcgaaggctgcaaagaatatgatgtggccccggaagttggtcacaagttctgtaaagactttccgggcttcatcccgtccctgctgggtgatctgctggaagaacgccagaagattaagcgtaagatgaaagcaaccgttgatccgctggaaaagaaactgctggactatcgccaacgtgcgatcaaaattctggccaacagctattacggctattacggttatgcgaaagcccgctggtactgccgtgaatgtgcagaatctgtgaccgcttggggccgcgaatatattgaaaccacgatccgtgaaatcgaagaaaagttcggtttcaaggttctgtacgctgataccgacggctttttcgcgacgatcccgggtgcagatgctgaaaccgtgaaaaagaaagctaaggaattcctgaagtacatcaacgcgaaactgccgggcctgctggaactggaatatgaaggcttctacgttcgtggctttttcgtcacgaagaaaaagtacgcggttatcgacgaagaaggcaaaattaccacgcgcggtctggaaatcgtgcgccgtgattggagtgaaattgccaaagaaacccaggcacgcgttctggaagcaatcctgcgtcatggtgacgtcgaagaagccgttcgcattgtcaaagatgtgacggaaaagctgtcgaaatatgaagtcccgccggaaaaactggtgatccatgaacaaattacccgtgaactgaaggattacaaagcgacgggcccgcacgttgcaattgctaaacgcctggcagcccgtggcatcaagattcgtccgggtaccgttatcagctatattgtcctgaaaggctctggtcgcatcggtgatcgtgctattccgtttgatgaattcgacccgacgaaacaccgttacgatgccgaatattacatcgaaaatcaggtgctgccggccgttgaacgcattctgaaagcatttggctataagaaagaagaactgcgctaccagaaaacccgtcaagtgggcctgggtgcgtggctgaagctgaaaggtaagaaataa

SEQ ID NO: 197 - DNA, 2322 bp, Artificial Sequence
  Synthetic
atgatcctggacaccgattacattaccgaagatggcaagccggttatccgcattttcaagaaagacaacggcgaatttaagattgaatatgatcgcaactttgaaccgtatatttacgcactgctgcgtgatgacagcgctatcgaagatgttaaaaagattaccgcggaacgtcatggccgcgtggttaaggtgaaacgcgccgaaaaagttaaaaagaaatttctgggtcgtccggtggaagtttggaaactgtatttcacgcgtccgcaggatgtgccggcaatccgtgaccgtattcgtgcacacccggcagtcgtggatatctatgaatacgacattccgtttgcaaaacgctacctgatcgataagggcattatcccgatggaaggtgacgaagaactgaaaatgctggcatttgatattgaaaccctgtatcatgaaggcgaagaattcgctgaaggtccgatcctgatgattagctacgccgatgaaaatgaagcacgcgtcatcacctggaagaaaattgatctgccgtttgtggacgttgtctctacggaaaaggaaatgatcaaacgtttcctgaaggtcattaaggaaaaagatccggacgtgctgattacctataacggcgataattttgacttcgcgtacctgaagaaacgctgcgaaaaatttggtatcaagttcacgctgggccgtgatggtagcgacccgaaaattcagcgtatgggcgaccgctttgccgtcgaagtgaaaggtcgtatccacttcgatctgtatccggtcattctgcgcaccgtgaacctgccgacctatacgctggaagctgtttacgaagcgatctttggcaccccgaaggaaaaagtgtatccggaagaaattaccacggcatgggaaacgggcgaaggtctggaacgtgttgcgcgctactcaatggaagatgccaaagtcacctttgaactgggtcgtgaatttttcccgatggaagcgcagctgtcgcgcctggttggccaatcattttgggatgtctcgcgtagctctacgggtaatctggtggaatggttcctgctgcgtaaagcgtatgaacgcaacgaactggcgccgaataaaccggatgaaaaggaactggcacgtcgccgtggcggttatgcaggcggttacgtcaaagaaccggaacgtggcctgtgggataatattgtgtatctggactttcgcagtctgtacccgtccattatcattacccataacgttagtccggacacgctgaatcgcgaaggctgcaaagaatatgatgtggccccggaagttggtcacaagttctgtaaagactttccgggcttcatcccgtccctgctgggtgatctgctggaagaacgccagaagattaagcgtaagatgaaagcaaccgttgatccgctggaaaagaaactgctggactatcgccaacgtgcgatcaaaattctggccaacagctattacggctattacggttatgcgaaagcccgctggtactgccgtgaatgtgcagaatctgtgaccgcttggggccgcgaatatattgaaaccacgatccgtgaaatcgaagaaaagttcggtttcaaggttctgtacgctgataccgacggctttttcgcgacgatcccgggtgcagatgctgaaaccgtgaaaaagaaagctaaggaattcctgaagtacatcaacgcgaaactgccgggcctgctggaactggaatatgaaggcttctacgttcgtggctttttcgtcacgaagaaaaagtacgcggttatcgacgaagaaggcaaaattaccacgcgcggtctggaaatcgtgcgccgtgattggagtgaaattgccaaagaaacccaggcacgtgtcctggaagcaatcctgaaacatggtgatgtggaagaagcggttcgcattgtcaaagaagtgacggaaaagctgtcgaaatatgaagttccgccggaaaaactggtcatccatgaacaaattacccgcgatctgcgtgactacaaagccacgggtccgcacgtggcagttgcaaaacgtctggcagcccgtggcgtgaagattcgtccgggtaccgtgatcagttatattgttctgaaaggctccggtcgcatcggtgaccgtgctattccgtttgatgaattcgacccgacgaaacaccgttacgatgccgaatattacatcgaaaatcaggtcctgccggccgtggaacgcattctgaaagcatttggttatcgcaaggaagatctgcgttaccagaagaccaaacaagtcggcctgggtgcgtggctgaaagtgaaaaagtaa

SEQ ID NO: 198 - DNA, 2328 bp, Artificial Sequence
  Synthetic
atgatcctggacaccgattacattaccgaagatggcaagccggttatccgcattttcaagaaagacaacggcgaatttaagattgaatatgatcgcaactttgaaccgtatatttacgcactgctgcgtgatgacagcgctatcgaagatgttaaaaagattaccgcggaacgtcatggccgcgtggttaaggtgaaacgcgccgaaaaagttaaaaagaaatttctgggtcgtccggtggaagtttggaaactgtatttcacgcgtccgcaggatgtgccggcaatccgtgaccgtattcgtgcacacccggcagtcgtggatatctatgaatacgacattccgtttgcaaaacgctacctgatcgataagggcattatcccgatggaaggtgacgaagaactgaaaatgctggcatttgatattgaaaccctgtatcatgaaggcgaagaattcgctgaaggtccgatcctgatgattagctacgccgatgaaaatgaagcacgcgtcatcacctggaagaaaattgatctgccgtttgtggacgttgtctctacggaaaaggaaatgatcaaacgtttcctgaaggtcattaaggaaaaagatccggacgtgctgattacctataacggcgataattttgacttcgcgtacctgaagaaacgctgcgaaaaatttggtatcaagttcacgctgggccgtgatggtagcgacccgaaaattcagcgtatgggcgaccgctttgccgtcgaagtgaaaggtcgtatccacttcgatctgtatccggtcattctgcgcaccgtgaacctgccgacctatacgctggaagctgtttacgaagcgatctttggcaccccgaaggaaaaagtgtatccggaagaaattaccacggcatgggaaacgggcgaaggtctggaacgtgttgcgcgctactcaatggaagatgccaaagtcacctttgaactgggtcgtgaatttttcccgatggaagcgcagctgtcgcgcctggttggccaatcattttgggatgtctcgcgtagctctacgggtaatctggtggaatggttcctgctgcgtaaagcgtatgaacgcaacgaactggcgccgaataaaccggatgaaaaggaactggcacgtcgccgtggcggttatgcaggcggttacgtcaaagaaccggaacgtggcctgtgggataatattgtgtatctggactttcgcagtctgtacccgtccattatcattacccataacgttagtccggacacgctgaatcgcgaaggctgcaaagaatatgatgtggccccggaagttggtcacaagttctgtaaagactttccgggcttcatcccgtccctgctgggtgatctgctggaagaacgccagaagattaagcgtaagatgaaagcaaccgttgatccgctggaaaagaaactgctggactatcgccaacgtgcgatcaaaattctggccaacagctattacggctattacggttatgcgaaagcccgctggtactgccgtgaatgtgcagaatctgtgaccgcttggggccgcgaatatattgaaaccacgatccgtgaaatcgaagaaaagttcggtttcaaggttctgtacgctgataccgacggctttttcgcgacgatcccgggtgcagatgctgaaaccgtgaaaaagaaagctaaggaattcctgaagtacatcaacgcgaaactgccgggcctgctggaactggaatatgaaggcttctacgttcgtggctttttcgtcacgaagaaaaagtacgcggttatcgacgaagaaggcaaaattaccacgcgcggtctggaaatcgtgcgccgtgattggagtgaaattgccaaagaaacccaggcacgtgtgctggaagctctgctgaaagatggcaatgttgaagaagcggtttccattgtcaaagaagtgacggaaaagctgggtaaatatgaagtcccgccggaaaaactggtgatccatgaacaaattacccgcgaactgaaggattacaaagcgacgggcccgcacgttgctatcgcgaaacgtctggcagcgcgtggcgtgaagattcgtccgggtaccgttatcagctatattgtcctgaaaggctctggtcgtatcggtgaccgcgcgattccgtttgatgaattcgacccgacgaaacatcgctacgatgcagaatattacatcgaaaaccaggttctgccggctgtcgaacgtattctgaaagcgtttggctatcgtgccgaagatctgcgctaccagaaaacccgtcaagtgggcctgggtgtttggctgcaaccgaaaggtaagaaataa

SEQ ID NO: 199 - DNA, 2325 bp, Artificial Sequence
  Synthetic
atgatcctggacaccgattacattaccgaagatggcaagccggttatccgcattttcaagaaagacaacggcgaatttaagattgaatatgatcgcaactttgaaccgtatatttacgcactgctgcgtgatgacagcgctatcgaagatgttaaaaagattaccgcggaacgtcatggccgcgtggttaaggtgaaacgcgccgaaaaagttaaaaagaaatttctgggtcgtccggtggaagtttggaaactgtatttcacgcgtccgcaggatgtgccggcaatccgtgaccgtattcgtgcacacccggcagtcgtggatatctatgaatacgacattccgtttgcaaaacgctacctgatcgataagggcattatcccgatggaaggtgacgaagaactgaaaatgctggcatttgatattgaaaccctgtatcatgaaggcgaagaattcgctgaaggtccgatcctgatgattagctacgccgatgaaaatgaagcacgcgtcatcacctggaagaaaattgatctgccgtttgtggacgttgtctctacggaaaaggaaatgatcaaacgtttcctgaaggtcattaaggaaaaagatccggacgtgctgattacctataacggcgataattttgacttcgcgtacctgaagaaacgctgcgaaaaatttggtatcaagttcacgctgggccgtgatggtagcgacccgaaaattcagcgtatgggcgaccgctttgccgtcgaagtgaaaggtcgtatccacttcgatctgtatccggtcattctgcgcaccgtgaacctgccgacctatacgctggaagctgtttacgaagcgatctttggcaccccgaaggaaaaagtgtatccggaagaaattaccacggcatgggaaacgggcgaaggtctggaacgtgttgcgcgctactcaatggaagatgccaaagtcacctttgaactgggtcgtgaatttttcccgatggaagcgcagctgtcgcgcctggttggccaatcattttgggatgtctcgcgtagctctacgggtaatctggtggaatggttcctgctgcgtaaagcgtatgaacgcaacgaactggcgccgaataaaccggatgaaaaggaactggcacgtcgccgtggcggttatgcaggcggttacgtcaaagaaccggaacgtggcctgtgggataatattgtgtatctggactttcgcagtctgtacccgtccattatcattacccataacgttagtccggacacgctgaatcgcgaaggctgcaaagaatatgatgtggccccggaagttggtcacaagttctgtaaagactttccgggcttcatcccgtccctgctgggtgatctgctggaagaacgccagaagattaagcgtaagatgaaagcaaccgttgatccgctggaaaagaaactgctggactatcgccaacgtgcgatcaaaattctggccaacagctattacggctattacggttatgcgaaagcccgctggtactgccgtgaatgtgcagaatctgtgaccgcttggggccgcgaatatattgaaaccacgatccgtgaaatcgaagaaaagttcggtttcaaggttctgtacgctgataccgacggctttttcgcgacgatcccgggtgcagatgctgaaaccgtgaaaaagaaagctaaggaattcctgaagtacatcaacgcgaaactgccgggcctgctggaactggaatatgaaggcttctacgttcgtggctttttcgtcacgaagaaaaagtacgcggttatcgacgaagaaggcaaaattaccacgcgcggtctggaaatcgtgcgccgtgattggagtgaaattgccaaagaaacccaggcaaaggttctggaagcaattctgaaacatggtaacgtcgaagaagcggtcaagatcgtgaaagaagttaccgaaaaactgtcgaattatgaaattccggtcgaaaagctggtgatctacgaacaaattacgcgcccgctgaacgaatataaagccattggcccgcacgtggcagttgctaaacgtctggcggccaagggtatcaagattaaaccgggcatggtgattggttatgttgtcctgcgcggcgatggtccgatcagcaaacgtgcgatcgccatcgaagaattcgatggcaaaaagcataagtacgacgcagaatactacatcgaaaatcaggttctgccggccgtcgaacgtatcctgaaagcattcggttataagcgtgaagatctgcgctggcagaagaccaaacaagtgggcctgggtgcgtggctgaaagttaaaaagtcttaa

SEQ ID NO: 200 - DNA, 2328 bp, Artificial Sequence
  Synthetic
atgatcctggacaccgattacattaccgaagatggcaagccggttatccgcattttcaagaaagacaacggcgaatttaagattgaatatgatcgcaactttgaaccgtatatttacgcactgctgcgtgatgacagcgctatcgaagatgttaaaaagattaccgcggaacgtcatggccgcgtggttaaggtgaaacgcgccgaaaaagttaaaaagaaatttctgggtcgtccggtggaagtttggaaactgtatttcacgcgtccgcaggatgtgccggcaatccgtgaccgtattcgtgcacacccggcagtcgtggatatctatgaatacgacattccgtttgcaaaacgctacctgatcgataagggcattatcccgatggaaggtgacgaagaactgaaaatgctggcatttgatattgaaaccctgtatcatgaaggcgaagaattcgctgaaggtccgatcctgatgattagctacgccgatgaaaatgaagcacgcgtcatcacctggaagaaaattgatctgccgtttgtggacgttgtctctacggaaaaggaaatgatcaaacgtttcctgaaggtcattaaggaaaaagatccggacgtgctgattacctataacggcgataattttgacttcgcgtacctgaagaaacgctgcgaaaaatttggtatcaagttcacgctgggccgtgatggtagcgacccgaaaattcagcgtatgggcgaccgctttgccgtcgaagtgaaaggtcgtatccacttcgatctgtatccggtcattctgcgcaccgtgaacctgccgacctatacgctggaagctgtttacgaagcgatctttggcaccccgaaggaaaaagtgtatccggaagaaattaccacggcatgggaaacgggcgaaggtctggaacgtgttgcgcgctactcaatggaagatgccaaagtcacctttgaactgggtcgtgaatttttcccgatggaagcgcagctgtcgcgcctggttggccaatcattttgggatgtctcgcgtagctctacgggtaatctggtggaatggttcctgctgcgtaaagcgtatgaacgcaacgaactggcgccgaataaaccggatgaaaaggaactggcacgtcgccgtggcggttatgcaggcggttacgtcaaagaaccggaacgtggcctgtgggataatattgtgtatctggactttcgcagtctgtacccgtccattatcattacccataacgttagtccggacacgctgaatcgcgaaggctgcaaagaatatgatgtggccccggaagttggtcacaagttctgtaaagactttccgggcttcatcccgtccctgctgggtgatctgctggaagaacgccagaagattaagcgtaagatgaaagcaaccgttgatccgctggaaaagaaactgctggactatcgccaacgtgcgatcaaaattctggccaacagctattacggctattacggttatgcgaaagcccgctggtactgccgtgaatgtgcagaatctgtgaccgcttggggccgcgaatatattgaaaccacgatccgtgaaatcgaagaaaagttcggtttcaaggttctgtacgctgataccgacggctttttcgcgacgatcccgggtgcagatgctgaaaccgtgaaaaagaaagctaaggaattcctgaagtacatcaacgcgaaactgccgggcctgctggaactggaatatgaaggcttctacgttcgtggctttttcgtcacgaagaaaaagtacgcggttatcgacgaagaaggcaaaattaccacgcgcggtctggaaatcgtgcgccgtgattggagtgaaattgccaaagaaacccaggcacgtgttctggaagcactgctgaaagatggtaatgtcgaagaagcagtgagtattgttaaagaagtcacggaaaaactgtccaagtatgaagtcccgccggaaaaactggtgattcatgaacaaatcacccgcgaactgaaagattacaaggcgacgggcccgcacgtggcaattgctaaacgtctggcagcgcgtggcgttaagatccgtccgggtaccgttattagctatatcgtcctgaaaggctctggtcgtattggtgaccgcgccatcccgtttgatgaattcgacccggctaaacaccgctacgatgcggaatattacattgaaaatcaggtcctgccggctgtggaacgtatcctgaaagcgtttggctatcgtaaggaagatctgcgctaccagaaaacccgtcaagtgggcctgggtgcgtggctgaaaccgaagggtaaaaagtaa

SEQ ID NO: 201 - DNA, 2328 bp, Artificial Sequence
  Synthetic
atgatcctggacaccgattacattaccgaagatggcaagccggttatccgcattttcaagaaagacaacggcgaatttaagattgaatatgatcgcaactttgaaccgtatatttacgcactgctgcgtgatgacagcgctatcgaagatgttaaaaagattaccgcggaacgtcatggccgcgtggttaaggtgaaacgcgccgaaaaagttaaaaagaaatttctgggtcgtccggtggaagtttggaaactgtatttcacgcgtccgcaggatgtgccggcaatccgtgaccgtattcgtgcacacccggcagtcgtggatatctatgaatacgacattccgtttgcaaaacgctacctgatcgataagggcattatcccgatggaaggtgacgaagaactgaaaatgctggcatttgatattgaaaccctgtatcatgaaggcgaagaattcgctgaaggtccgatcctgatgattagctacgccgatgaaaatgaagcacgcgtcatcacctggaagaaaattgatctgccgtttgtggacgttgtctctacggaaaaggaaatgatcaaacgtttcctgaaggtcattaaggaaaaagatccggacgtgctgattacctataacggcgataattttgacttcgcgtacctgaagaaacgctgcgaaaaatttggtatcaagttcacgctgggccgtgatggtagcgacccgaaaattcagcgtatgggcgaccgctttgccgtcgaagtgaaaggtcgtatccacttcgatctgtatccggtcattctgcgcaccgtgaacctgccgacctatacgctggaagctgtttacgaagcgatctttggcaccccgaaggaaaaagtgtatccggaagaaattaccacggcatgggaaacgggcgaaggtctggaacgtgttgcgcgctactcaatggaagatgccaaagtcacctttgaactgggtcgtgaatttttcccgatggaagcgcagctgtcgcgcctggttggccaatcattttgggatgtctcgcgtagctctacgggtaatctggtggaatggttcctgctgcgtaaagcgtatgaacgcaacgaactggcgccgaataaaccggatgaaaaggaactggcacgtcgccgtggcggttatgcaggcggttacgtcaaagaaccggaacgtggcctgtgggataatattgtgtatctggactttcgcagtctgtacccgtccattatcattacccataacgttagtccggacacgctgaatcgcgaaggctgcaaagaatatgatgtggccccggaagttggtcacaagttctgtaaagactttccgggcttcatcccgtccctgctgggtgatctgctggaagaacgccagaagattaagcgtaagatgaaagcaaccgttgatccgctggaaaagaaactgctggactatcgccaacgtgcgatcaaaattctggccaacagctattacggctattacggttatgcgaaagcccgctggtactgccgtgaatgtgcagaatctgtgaccgcttggggccgcgaatatattgaaaccacgatccgtgaaatcgaagaaaagttcggtttcaaggttctgtacgctgataccgacggctttttcgcgacgatcccgggtgcagatgctgaaaccgtgaaaaagaaagctaaggaattcctgaagtacatcaacgcgaaactgccgggcctgctggaactggaatatgaaggcttctacgttcgtggctttttcgtcacgaagaaaaagtacgcggttatcgacgaagaaggcaaaattaccacgcgcggtctggaaatcgtgcgccgtgattggagtgaaattgccaaagaaacccaggcacgcgtcctggaagcaatcctgaaagatggtgacgtggaagaagccgtccgtattgtgaaagaagttacggaaaaactgtccaaatatgaagttccgccggaaaaactggtcatccatgaacaaattacccgcgaactgaaagattacaaagcgacgggcccgcacgtcgcaatcgctaaacgtctggcggcgcgtggcgtgaaaattcgtccgggtaccgtgatctcatatattgttctgaaaggctcgggtcgtatcggtgaccgcgctattccgtttgatgaattcgacccgaaaaaacacaaatacgatgcggaatactacatcgaaaaccaggttctgccggccgtcgaacgtattctgcgcgcatttggctaccgtaaagaagatctgcgttatcaaaaaaccaaacaagtgggtctgggtgcgtggctgaaaccgaaaggtaaaaaataa

SEQ ID NO: 202 - DNA, 2325 bp, Artificial Sequence
  Synthetic
atgatcctggacaccgattacattaccgaagatggcaagccggttatccgcattttcaagaaagacaacggcgaatttaagattgaatatgatcgcaactttgaaccgtatatttacgcactgctgcgtgatgacagcgctatcgaagatgttaaaaagattaccgcggaacgtcatggccgcgtggttaaggtgaaacgcgccgaaaaagttaaaaagaaatttctgggtcgtccggtggaagtttggaaactgtatttcacgcgtccgcaggatgtgccggcaatccgtgaccgtattcgtgcacacccggcagtcgtggatatctatgaatacgacattccgtttgcaaaacgctacctgatcgataagggcattatcccgatggaaggtgacgaagaactgaaaatgctggcatttgatattgaaaccctgtatcatgaaggcgaagaattcgctgaaggtccgatcctgatgattagctacgccgatgaaaatgaagcacgcgtcatcacctggaagaaaattgatctgccgtttgtggacgttgtctctacggaaaaggaaatgatcaaacgtttcctgaaggtcattaaggaaaaagatccggacgtgctgattacctataacggcgataattttgacttcgcgtacctgaagaaacgctgcgaaaaatttggtatcaagttcacgctgggccgtgatggtagcgacccgaaaattcagcgtatgggcgaccgctttgccgtcgaagtgaaaggtcgtatccacttcgatctgtatccggtcattctgcgcaccgtgaacctgccgacctatacgctggaagctgtttacgaagcgatctttggcaccccgaaggaaaaagtgtatccggaagaaattaccacggcatgggaaacgggcgaaggtctggaacgtgttgcgcgctactcaatggaagatgccaaagtcacctttgaactgggtcgtgaatttttcccgatggaagcgcagctgtcgcgcctggttggccaatcattttgggatgtctcgcgtagctctacgggtaatctggtggaatggttcctgctgcgtaaagcgtatgaacgcaacgaactggcgccgaataaaccggatgaaaaggaactggcacgtcgccgtggcggttatgcaggcggttacgtcaaagaaccggaacgtggcctgtgggataatattgtgtatctggactttcgcagtctgtacccgtccattatcattacccataacgttagtccggacacgctgaatcgcgaaggctgcaaagaatatgatgtggccccggaagttggtcacaagttctgtaaagactttccgggcttcatcccgtccctgctgggtgatctgctggaagaacgccagaagattaagcgtaagatgaaagcaaccgttgatccgctggaaaagaaactgctggactatcgccaacgtgcgatcaaaattctggccaacagctattacggctattacggttatgcgaaagcccgctggtactgccgtgaatgtgcagaatctgtgaccgcttggggccgcgaatatattgaaaccacgatccgtgaaatcgaagaaaagttcggtttcaaggttctgtacgctgataccgacggctttttcgcgacgatcccgggtgcagatgctgaaaccgtgaaaaagaaagctaaggaattcctgaagtacatcaacgcgaaactgccgggcctgctggaactggaatatgaaggcttctacgttcgtggctttttcgtcacgaagaaaaagtacgcggttatcgacgaagaaggcaaaattaccacgcgcggtctggaaatcgtgcgccgtgattggagtgaaattgccaaagaaacccaggcacgtgttctggaagcaattctgaaacatggtaacgtcgaagaagcggtcaaaatcgtgaaagaagttacggaaaaactgtctaactacgaaattccgccggaaaaactggccatctacgaacaaattacccgcccgctgcatgaatataaagcaatcggtccgcacgtcgcagtggcaaaacgtctggcagcacgcggcgttaaagtcaaaccgggtatggtcatcggctatattgtgctgcgtggtgatggcccgatcagcaaccgcgcaattctggctgaagaatacgatctgaaaaaacacaaatacgacgccgaatattacatcgaaaatcaggttctgccggctgtcctgcgtattctggaagcgtttggctatcgtaaagaagatctgcgctggcagaaaacccgtcaaacgggtctgacctcatggctgaatattaaaaaatcgtaa

SEQ ID NO: 203 - DNA, 2325 bp, Artificial Sequence
  Synthetic
atgatcctggacaccgattacattaccgaagatggcaagccggttatccgcattttcaagaaagacaacggcgaatttaagattgaatatgatcgcaactttgaaccgtatatttacgcactgctgcgtgatgacagcgctatcgaagatgttaaaaagattaccgcggaacgtcatggccgcgtggttaaggtgaaacgcgccgaaaaagttaaaaagaaatttctgggtcgtccggtggaagtttggaaactgtatttcacgcgtccgcaggatgtgccggcaatccgtgaccgtattcgtgcacacccggcagtcgtggatatctatgaatacgacattccgtttgcaaaacgctacctgatcgataagggcattatcccgatggaaggtgacgaagaactgaaaatgctggcatttgatattgaaaccctgtatcatgaaggcgaagaattcgctgaaggtccgatcctgatgattagctacgccgatgaaaatgaagcacgcgtcatcacctggaagaaaattgatctgccgtttgtggacgttgtctctacggaaaaggaaatgatcaaacgtttcctgaaggtcattaaggaaaaagatccggacgtgctgattacctataacggcgataattttgacttcgcgtacctgaagaaacgctgcgaaaaatttggtatcaagttcacgctgggccgtgatggtagcgacccgaaaattcagcgtatgggcgaccgctttgccgtcgaagtgaaaggtcgtatccacttcgatctgtatccggtcattctgcgcaccgtgaacctgccgacctatacgctggaagctgtttacgaagcgatctttggcaccccgaaggaaaaagtgtatccggaagaaattaccacggcatgggaaacgggcgaaggtctggaacgtgttgcgcgctactcaatggaagatgccaaagtcacctttgaactgggtcgtgaatttttcccgatggaagcgcagctgtcgcgcctggttggccaatcattttgggatgtctcgcgtagctctacgggtaatctggtggaatggttcctgctgcgtaaagcgtatgaacgcaacgaactggcgccgaataaaccggatgaaaaggaactggcacgtcgccgtggcggttatgcaggcggttacgtcaaagaaccggaacgtggcctgtgggataatattgtgtatctggactttcgcagtctgtacccgtccattatcattacccataacgttagtccggacacgctgaatcgcgaaggctgcaaagaatatgatgtggccccggaagttggtcacaagttctgtaaagactttccgggcttcatcccgtccctgctgggtgatctgctggaagaacgccagaagattaagcgtaagatgaaagcaaccgttgatccgctggaaaagaaactgctggactatcgccaacgtgcgatcaaaattctggccaacagctattacggctattacggttatgcgaaagcccgctggtactgccgtgaatgtgcagaatctgtgaccgcttggggccgcgaatatattgaaaccacgatccgtgaaatcgaagaaaagttcggtttcaaggttctgtacgctgataccgacggctttttcgcgacgatcccgggtgcagatgctgaaaccgtgaaaaagaaagctaaggaattcctgaagtacatcaacgcgaaactgccgggcctgctggaactggaatatgaaggcttctacgttcgtggctttttcgtcacgaagaaaaagtacgcggttatcgacgaagaaggcaaaattaccacgcgcggtctggaaatcgtgcgccgtgattggagtgaaattgccaaagaaacccaggcaaaagttctggaagcaatcctgaaacatggtaatgtcgaagaagcagtgaaaattgtcaaggaagtgacggaaaaactgtcgaagtatgaaatcccgccggaaaaactggtgatctacgaacaaattacccgcccgctgcatgaatataaagcgattggcccgcacgtggcagttgctaaacgtctggcagcccgcggtgtcaaagtgcgtccgggcatggtgatcggttatattgttctgcgtggcgatggtccgatcagtaaacgcgcgattctggccgaagaatttgatccgcgcaaacacaagtacgacgccgaatattacatcgaaaaccaggtgctgccggctgttctgcgtattctggaagcgttcggctatcgtaaagaagatctgcgctggcagaaaaccaagcaaacgggtctgaccgcatggctgaatgtgaaaaagaaataa

SEQ ID NO: 204 - DNA, 2328 bp, Artificial Sequence
  Synthetic
atgatcctggacaccgattacattaccgaagatggcaagccggttatccgcattttcaagaaagacaacggcgaatttaagattgaatatgatcgcaactttgaaccgtatatttacgcactgctgcgtgatgacagcgctatcgaagatgttaaaaagattaccgcggaacgtcatggccgcgtggttaaggtgaaacgcgccgaaaaagttaaaaagaaatttctgggtcgtccggtggaagtttggaaactgtatttcacgcgtccgcaggatgtgccggcaatccgtgaccgtattcgtgcacacccggcagtcgtggatatctatgaatacgacattccgtttgcaaaacgctacctgatcgataagggcattatcccgatggaaggtgacgaagaactgaaaatgctggcatttgatattgaaaccctgtatcatgaaggcgaagaattcgctgaaggtccgatcctgatgattagctacgccgatgaaaatgaagcacgcgtcatcacctggaagaaaattgatctgccgtttgtggacgttgtctctacggaaaaggaaatgatcaaacgtttcctgaaggtcattaaggaaaaagatccggacgtgctgattacctataacggcgataattttgacttcgcgtacctgaagaaacgctgcgaaaaatttggtatcaagttcacgctgggccgtgatggtagcgacccgaaaattcagcgtatgggcgaccgctttgccgtcgaagtgaaaggtcgtatccacttcgatctgtatccggtcattctgcgcaccgtgaacctgccgacctatacgctggaagctgtttacgaagcgatctttggcaccccgaaggaaaaagtgtatccggaagaaattaccacggcatgggaaacgggcgaaggtctggaacgtgttgcgcgctactcaatggaagatgccaaagtcacctttgaactgggtcgtgaatttttcccgatggaagcgcagctgtcgcgcctggttggccaatcattttgggatgtctcgcgtagctctacgggtaatctggtggaatggttcctgctgcgtaaagcgtatgaacgcaacgaaattgcgccgaataaaccggatgaacgtgaactggcacgtcgccgtggcggttatgcaggcggttacgttaaagaaccggaacgcggcctgtgggataatatcgtctatctggactttatgagtctgtacccgtccattatcattacccataacgttagtccggacacgttcaatcgtgaaggctgcaaagaatatgataccgccccgcaggttggtcacaagttttgtaaagacgtccaaggcttcattccgagtctgctgggtgccctgctggatgaacgccagaaaatcaagaaacgtatgaaggcatccattgatccgctggaaaagaaactgctggactatcgccaaaaggcgatcaaaattctggccaactcatattacggctattacggttatgcacgcgctcgttggtactgcaaagaatgtgcagaatcggtgaccgcttggggccgtgattatattgaaaccacgatccacgaaattgaagaacgctttggtttcaaagttctgtacgctgataccgacggctttttcgcgacgatcccgggtgcggatgccgaaaccgtgaagaaaaaggctaaggaattcctgaagtacatcaacgcgaaactgccgggcctgctggaactggaatatgaaggcttctacgtccgtggctttttcgtgaccaaaaagaaatacgcggttatcgacgaagaaggcaaaattaccacgcgcggtctggaaatcgtgcgccgtgattggagtgaaattgccaaagaaacccaggcacgcgttctggaagcaatcctgcgtcatggtgacgtcgaagaagccgttcgcattgtcaaagatgtgacggaaaagctgtcgaaatatgaagtcccgccggaaaaactggtgatccatgaacaaattacccgtgaactgaaggattacaaagcgacgggcccgcacgttgcaattgctaaacgcctggcagcccgtggcatcaagattcgtccgggtaccgttatcagctatattgtcctgaaaggctctggtcgcatcggtgatcgtgctattccgtttgatgaattcgacccgacgaaacaccgttacgatgccgaatattacatcgaaaatcaggtgctgccggccgttgaacgcattctgaaagcatttggctataagaaagaagaactgcgctaccagaaaacccgtcaagtgggcctgggtgcgtggctgaagctgaaaggtaagaaataa

SEQ ID NO: 205 - DNA, 2322 bp, Artificial Sequence
  Synthetic
atgatcctggacaccgattacattaccgaagatggcaagccggttatccgcattttcaagaaagacaacggcgaatttaagattgaatatgatcgcaactttgaaccgtatatttacgcactgctgcgtgatgacagcgctatcgaagatgttaaaaagattaccgcggaacgtcatggccgcgtggttaaggtgaaacgcgccgaaaaagttaaaaagaaatttctgggtcgtccggtggaagtttggaaactgtatttcacgcgtccgcaggatgtgccggcaatccgtgaccgtattcgtgcacacccggcagtcgtggatatctatgaatacgacattccgtttgcaaaacgctacctgatcgataagggcattatcccgatggaaggtgacgaagaactgaaaatgctggcatttgatattgaaaccctgtatcatgaaggcgaagaattcgctgaaggtccgatcctgatgattagctacgccgatgaaaatgaagcacgcgtcatcacctggaagaaaattgatctgccgtttgtggacgttgtctctacggaaaaggaaatgatcaaacgtttcctgaaggtcattaaggaaaaagatccggacgtgctgattacctataacggcgataattttgacttcgcgtacctgaagaaacgctgcgaaaaatttggtatcaagttcacgctgggccgtgatggtagcgacccgaaaattcagcgtatgggcgaccgctttgccgtcgaagtgaaaggtcgtatccacttcgatctgtatccggtcattctgcgcaccgtgaacctgccgacctatacgctggaagctgtttacgaagcgatctttggcaccccgaaggaaaaagtgtatccggaagaaattaccacggcatgggaaacgggcgaaggtctggaacgtgttgcgcgctactcaatggaagatgccaaagtcacctttgaactgggtcgtgaatttttcccgatggaagcgcagctgtcgcgcctggttggccaatcattttgggatgtctcgcgtagctctacgggtaatctggtggaatggttcctgctgcgtaaagcgtatgaacgcaacgaaattgcgccgaataaaccggatgaacgtgaactggcacgtcgccgtggcggttatgcaggcggttacgttaaagaaccggaacgcggcctgtgggataatatcgtctatctggactttatgagtctgtacccgtccattatcattacccataacgttagtccggacacgttcaatcgtgaaggctgcaaagaatatgataccgccccgcaggttggtcacaagttttgtaaagacgtccaaggcttcattccgagtctgctgggtgccctgctggatgaacgccagaaaatcaagaaacgtatgaaggcatccattgatccgctggaaaagaaactgctggactatcgccaaaaggcgatcaaaattctggccaactcatattacggctattacggttatgcacgcgctcgttggtactgcaaagaatgtgcagaatcggtgaccgcttggggccgtgattatattgaaaccacgatccacgaaattgaagaacgctttggtttcaaagttctgtacgctgataccgacggctttttcgcgacgatcccgggtgcggatgccgaaaccgtgaagaaaaaggctaaggaattcctgaagtacatcaacgcgaaactgccgggcctgctggaactggaatatgaaggcttctacgtccgtggctttttcgtgaccaaaaagaaatacgcggttatcgacgaagaaggcaaaattaccacgcgcggtctggaaatcgtgcgccgtgattggagtgaaattgccaaagaaacccaggcacgtgtcctggaagcaatcctgaaacatggtgatgtggaagaagcggttcgcattgtcaaagaagtgacggaaaagctgtcgaaatatgaagttccgccggaaaaactggtcatccatgaacaaattacccgcgatctgcgtgactacaaagccacgggtccgcacgtggcagttgcaaaacgtctggcagcccgtggcgtgaagattcgtccgggtaccgtgatcagttatattgttctgaaaggctccggtcgcatcggtgaccgtgctattccgtttgatgaattcgacccgacgaaacaccgttacgatgccgaatattacatcgaaaatcaggtcctgccggccgtggaacgcattctgaaagcatttggttatcgcaaggaagatctgcgttaccagaagaccaaacaagtcggcctgggtgcgtggctgaaagtgaaaaagtaa

SEQ ID NO: 206 - DNA, 2328 bp, Artificial Sequence
  Synthetic
atgatcctggacaccgattacattaccgaagatggcaagccggttatccgcattttcaagaaagacaacggcgaatttaagattgaatatgatcgcaactttgaaccgtatatttacgcactgctgcgtgatgacagcgctatcgaagatgttaaaaagattaccgcggaacgtcatggccgcgtggttaaggtgaaacgcgccgaaaaagttaaaaagaaatttctgggtcgtccggtggaagtttggaaactgtatttcacgcgtccgcaggatgtgccggcaatccgtgaccgtattcgtgcacacccggcagtcgtggatatctatgaatacgacattccgtttgcaaaacgctacctgatcgataagggcattatcccgatggaaggtgacgaagaactgaaaatgctggcatttgatattgaaaccctgtatcatgaaggcgaagaattcgctgaaggtccgatcctgatgattagctacgccgatgaaaatgaagcacgcgtcatcacctggaagaaaattgatctgccgtttgtggacgttgtctctacggaaaaggaaatgatcaaacgtttcctgaaggtcattaaggaaaaagatccggacgtgctgattacctataacggcgataattttgacttcgcgtacctgaagaaacgctgcgaaaaatttggtatcaagttcacgctgggccgtgatggtagcgacccgaaaattcagcgtatgggcgaccgctttgccgtcgaagtgaaaggtcgtatccacttcgatctgtatccggtcattctgcgcaccgtgaacctgccgacctatacgctggaagctgtttacgaagcgatctttggcaccccgaaggaaaaagtgtatccggaagaaattaccacggcatgggaaacgggcgaaggtctggaacgtgttgcgcgctactcaatggaagatgccaaagtcacctttgaactgggtcgtgaatttttcccgatggaagcgcagctgtcgcgcctggttggccaatcattttgggatgtctcgcgtagctctacgggtaatctggtggaatggttcctgctgcgtaaagcgtatgaacgcaacgaaattgcgccgaataaaccggatgaacgtgaactggcacgtcgccgtggcggttatgcaggcggttacgttaaagaaccggaacgcggcctgtgggataatatcgtctatctggactttatgagtctgtacccgtccattatcattacccataacgttagtccggacacgttcaatcgtgaaggctgcaaagaatatgataccgccccgcaggttggtcacaagttttgtaaagacgtccaaggcttcattccgagtctgctgggtgccctgctggatgaacgccagaaaatcaagaaacgtatgaaggcatccattgatccgctggaaaagaaactgctggactatcgccaaaaggcgatcaaaattctggccaactcatattacggctattacggttatgcacgcgctcgttggtactgcaaagaatgtgcagaatcggtgaccgcttggggccgtgattatattgaaaccacgatccacgaaattgaagaacgctttggtttcaaagttctgtacgctgataccgacggctttttcgcgacgatcccgggtgcggatgccgaaaccgtgaagaaaaaggctaaggaattcctgaagtacatcaacgcgaaactgccgggcctgctggaactggaatatgaaggcttctacgtccgtggctttttcgtgaccaaaaagaaatacgcggttatcgacgaagaaggcaaaattaccacgcgcggtctggaaatcgtgcgccgtgattggagtgaaattgccaaagaaacccaggcacgtgtgctggaagctctgctgaaagatggcaatgttgaagaagcggtttccattgtcaaagaagtgacggaaaagctgggtaaatatgaagtcccgccggaaaaactggtgatccatgaacaaattacccgcgaactgaaggattacaaagcgacgggcccgcacgttgctatcgcgaaacgtctggcagcgcgtggcgtgaagattcgtccgggtaccgttatcagctatattgtcctgaaaggctctggtcgtatcggtgaccgcgcgattccgtttgatgaattcgacccgacgaaacatcgctacgatgcagaatattacatcgaaaaccaggttctgccggctgtcgaacgtattctgaaagcgtttggctatcgtgccgaagatctgcgctaccagaaaacccgtcaagtgggcctgggtgtttggctgcaaccgaaaggtaagaaataa

SEQ ID NO: 207 - DNA, 2325 bp, Artificial Sequence
  Synthetic
atgatcctggacaccgattacattaccgaagatggcaagccggttatccgcattttcaagaaagacaacggcgaatttaagattgaatatgatcgcaactttgaaccgtatatttacgcactgctgcgtgatgacagcgctatcgaagatgttaaaaagattaccgcggaacgtcatggccgcgtggttaaggtgaaacgcgccgaaaaagttaaaaagaaatttctgggtcgtccggtggaagtttggaaactgtatttcacgcgtccgcaggatgtgccggcaatccgtgaccgtattcgtgcacacccggcagtcgtggatatctatgaatacgacattccgtttgcaaaacgctacctgatcgataagggcattatcccgatggaaggtgacgaagaactgaaaatgctggcatttgatattgaaaccctgtatcatgaaggcgaagaattcgctgaaggtccgatcctgatgattagctacgccgatgaaaatgaagcacgcgtcatcacctggaagaaaattgatctgccgtttgtggacgttgtctctacggaaaaggaaatgatcaaacgtttcctgaaggtcattaaggaaaaagatccggacgtgctgattacctataacggcgataattttgacttcgcgtacctgaagaaacgctgcgaaaaatttggtatcaagttcacgctgggccgtgatggtagcgacccgaaaattcagcgtatgggcgaccgctttgccgtcgaagtgaaaggtcgtatccacttcgatctgtatccggtcattctgcgcaccgtgaacctgccgacctatacgctggaagctgtttacgaagcgatctttggcaccccgaaggaaaaagtgtatccggaagaaattaccacggcatgggaaacgggcgaaggtctggaacgtgttgcgcgctactcaatggaagatgccaaagtcacctttgaactgggtcgtgaatttttcccgatggaagcgcagctgtcgcgcctggttggccaatcattttgggatgtctcgcgtagctctacgggtaatctggtggaatggttcctgctgcgtaaagcgtatgaacgcaacgaaattgcgccgaataaaccggatgaacgtgaactggcacgtcgccgtggcggttatgcaggcggttacgttaaagaaccggaacgcggcctgtgggataatatcgtctatctggactttatgagtctgtacccgtccattatcattacccataacgttagtccggacacgttcaatcgtgaaggctgcaaagaatatgataccgccccgcaggttggtcacaagttttgtaaagacgtccaaggcttcattccgagtctgctgggtgccctgctggatgaacgccagaaaatcaagaaacgtatgaaggcatccattgatccgctggaaaagaaactgctggactatcgccaaaaggcgatcaaaattctggccaactcatattacggctattacggttatgcacgcgctcgttggtactgcaaagaatgtgcagaatcggtgaccgcttggggccgtgattatattgaaaccacgatccacgaaattgaagaacgctttggtttcaaagttctgtacgctgataccgacggctttttcgcgacgatcccgggtgcggatgccgaaaccgtgaagaaaaaggctaaggaattcctgaagtacatcaacgcgaaactgccgggcctgctggaactggaatatgaaggcttctacgtccgtggctttttcgtgaccaaaaagaaatacgcggttatcgacgaagaaggcaaaattaccacgcgcggtctggaaatcgtgcgccgtgattggagtgaaattgccaaagaaacccaggcaaaggttctggaagcaattctgaaacatggtaacgtcgaagaagcggtcaagatcgtgaaagaagttaccgaaaaactgtcgaattatgaaattccggtcgaaaagctggtgatctacgaacaaattacgcgcccgctgaacgaatataaagccattggcccgcacgtggcagttgctaaacgtctggcggccaagggtatcaagattaaaccgggcatggtgattggttatgttgtcctgcgcggcgatggtccgatcagcaaacgtgcgatcgccatcgaagaattcgatggcaaaaagcataagtacgacgcagaatactacatcgaaaatcaggttctgccggccgtcgaacgtatcctgaaagcattcggttataagcgtgaagatctgcgctggcagaagaccaaacaagtgggcctgggtgcgtggctgaaagttaaaaagtcttaa

SEQ ID NO: 208 - DNA, 2328 bp, Artificial Sequence
  Synthetic
atgatcctggacaccgattacattaccgaagatggcaagccggttatccgcattttcaagaaagacaacggcgaatttaagattgaatatgatcgcaactttgaaccgtatatttacgcactgctgcgtgatgacagcgctatcgaagatgttaaaaagattaccgcggaacgtcatggccgcgtggttaaggtgaaacgcgccgaaaaagttaaaaagaaatttctgggtcgtccggtggaagtttggaaactgtatttcacgcgtccgcaggatgtgccggcaatccgtgaccgtattcgtgcacacccggcagtcgtggatatctatgaatacgacattccgtttgcaaaacgctacctgatcgataagggcattatcccgatggaaggtgacgaagaactgaaaatgctggcatttgatattgaaaccctgtatcatgaaggcgaagaattcgctgaaggtccgatcctgatgattagctacgccgatgaaaatgaagcacgcgtcatcacctggaagaaaattgatctgccgtttgtggacgttgtctctacggaaaaggaaatgatcaaacgtttcctgaaggtcattaaggaaaaagatccggacgtgctgattacctataacggcgataattttgacttcgcgtacctgaagaaacgctgcgaaaaatttggtatcaagttcacgctgggccgtgatggtagcgacccgaaaattcagcgtatgggcgaccgctttgccgtcgaagtgaaaggtcgtatccacttcgatctgtatccggtcattctgcgcaccgtgaacctgccgacctatacgctggaagctgtttacgaagcgatctttggcaccccgaaggaaaaagtgtatccggaagaaattaccacggcatgggaaacgggcgaaggtctggaacgtgttgcgcgctactcaatggaagatgccaaagtcacctttgaactgggtcgtgaatttttcccgatggaagcgcagctgtcgcgcctggttggccaatcattttgggatgtctcgcgtagctctacgggtaatctggtggaatggttcctgctgcgtaaagcgtatgaacgcaacgaaattgcgccgaataaaccggatgaacgtgaactggcacgtcgccgtggcggttatgcaggcggttacgttaaagaaccggaacgcggcctgtgggataatatcgtctatctggactttatgagtctgtacccgtccattatcattacccataacgttagtccggacacgttcaatcgtgaaggctgcaaagaatatgataccgccccgcaggttggtcacaagttttgtaaagacgtccaaggcttcattccgagtctgctgggtgccctgctggatgaacgccagaaaatcaagaaacgtatgaaggcatccattgatccgctggaaaagaaactgctggactatcgccaaaaggcgatcaaaattctggccaactcatattacggctattacggttatgcacgcgctcgttggtactgcaaagaatgtgcagaatcggtgaccgcttggggccgtgattatattgaaaccacgatccacgaaattgaagaacgctttggtttcaaagttctgtacgctgataccgacggctttttcgcgacgatcccgggtgcggatgccgaaaccgtgaagaaaaaggctaaggaattcctgaagtacatcaacgcgaaactgccgggcctgctggaactggaatatgaaggcttctacgtccgtggctttttcgtgaccaaaaagaaatacgcggttatcgacgaagaaggcaaaattaccacgcgcggtctggaaatcgtgcgccgtgattggagtgaaattgccaaagaaacccaggcacgtgttctggaagcactgctgaaagatggtaatgtcgaagaagcagtgagtattgttaaagaagtcacggaaaaactgtccaagtatgaagtcccgccggaaaaactggtgattcatgaacaaatcacccgcgaactgaaagattacaaggcgacgggcccgcacgtggcaattgctaaacgtctggcagcgcgtggcgttaagatccgtccgggtaccgttattagctatatcgtcctgaaaggctctggtcgtattggtgaccgcgccatcccgtttgatgaattcgacccggctaaacaccgctacgatgcggaatattacattgaaaatcaggtcctgccggctgtggaacgtatcctgaaagcgtttggctatcgtaaggaagatctgcgctaccagaaaacccgtcaagtgggcctgggtgcgtggctgaaaccgaagggtaaaaagtaa

SEQ ID NO: 209 - DNA, 2328 bp, Artificial Sequence
  Synthetic
atgatcctggacaccgattacattaccgaagatggcaagccggttatccgcattttcaagaaagacaacggcgaatttaagattgaatatgatcgcaactttgaaccgtatatttacgcactgctgcgtgatgacagcgctatcgaagatgttaaaaagattaccgcggaacgtcatggccgcgtggttaaggtgaaacgcgccgaaaaagttaaaaagaaatttctgggtcgtccggtggaagtttggaaactgtatttcacgcgtccgcaggatgtgccggcaatccgtgaccgtattcgtgcacacccggcagtcgtggatatctatgaatacgacattccgtttgcaaaacgctacctgatcgataagggcattatcccgatggaaggtgacgaagaactgaaaatgctggcatttgatattgaaaccctgtatcatgaaggcgaagaattcgctgaaggtccgatcctgatgattagctacgccgatgaaaatgaagcacgcgtcatcacctggaagaaaattgatctgccgtttgtggacgttgtctctacggaaaaggaaatgatcaaacgtttcctgaaggtcattaaggaaaaagatccggacgtgctgattacctataacggcgataattttgacttcgcgtacctgaagaaacgctgcgaaaaatttggtatcaagttcacgctgggccgtgatggtagcgacccgaaaattcagcgtatgggcgaccgctttgccgtcgaagtgaaaggtcgtatccacttcgatctgtatccggtcattctgcgcaccgtgaacctgccgacctatacgctggaagctgtttacgaagcgatctttggcaccccgaaggaaaaagtgtatccggaagaaattaccacggcatgggaaacgggcgaaggtctggaacgtgttgcgcgctactcaatggaagatgccaaagtcacctttgaactgggtcgtgaatttttcccgatggaagcgcagctgtcgcgcctggttggccaatcattttgggatgtctcgcgtagctctacgggtaatctggtggaatggttcctgctgcgtaaagcgtatgaacgcaacgaaattgcgccgaataaaccggatgaacgtgaactggcacgtcgccgtggcggttatgcaggcggttacgttaaagaaccggaacgcggcctgtgggataatatcgtctatctggactttatgagtctgtacccgtccattatcattacccataacgttagtccggacacgttcaatcgtgaaggctgcaaagaatatgataccgccccgcaggttggtcacaagttttgtaaagacgtccaaggcttcattccgagtctgctgggtgccctgctggatgaacgccagaaaatcaagaaacgtatgaaggcatccattgatccgctggaaaagaaactgctggactatcgccaaaaggcgatcaaaattctggccaactcatattacggctattacggttatgcacgcgctcgttggtactgcaaagaatgtgcagaatcggtgaccgcttggggccgtgattatattgaaaccacgatccacgaaattgaagaacgctttggtttcaaagttctgtacgctgataccgacggctttttcgcgacgatcccgggtgcggatgccgaaaccgtgaagaaaaaggctaaggaattcctgaagtacatcaacgcgaaactgccgggcctgctggaactggaatatgaaggcttctacgtccgtggctttttcgtgaccaaaaagaaatacgcggttatcgacgaagaaggcaaaattaccacgcgcggtctggaaatcgtgcgccgtgattggagtgaaattgccaaagaaacccaggcacgcgtcctggaagcaatcctgaaagatggtgacgtggaagaagccgtccgtattgtgaaagaagttacggaaaaactgtccaaatatgaagttccgccggaaaaactggtcatccatgaacaaattacccgcgaactgaaagattacaaagcgacgggcccgcacgtcgcaatcgctaaacgtctggcggcgcgtggcgtgaaaattcgtccgggtaccgtgatctcatatattgttctgaaaggctcgggtcgtatcggtgaccgcgctattccgtttgatgaattcgacccgaaaaaacacaaatacgatgcggaatactacatcgaaaaccaggttctgccggccgtcgaacgtattctgcgcgcatttggctaccgtaaagaagatctgcgttatcaaaaaaccaaacaagtgggtctgggtgcgtggctgaaaccgaaaggtaaaaaataa

SEQ ID NO: 210 - DNA, 2325 bp, Artificial Sequence
  Synthetic
atgatcctggacaccgattacattaccgaagatggcaagccggttatccgcattttcaagaaagacaacggcgaatttaagattgaatatgatcgcaactttgaaccgtatatttacgcactgctgcgtgatgacagcgctatcgaagatgttaaaaagattaccgcggaacgtcatggccgcgtggttaaggtgaaacgcgccgaaaaagttaaaaagaaatttctgggtcgtccggtggaagtttggaaactgtatttcacgcgtccgcaggatgtgccggcaatccgtgaccgtattcgtgcacacccggcagtcgtggatatctatgaatacgacattccgtttgcaaaacgctacctgatcgataagggcattatcccgatggaaggtgacgaagaactgaaaatgctggcatttgatattgaaaccctgtatcatgaaggcgaagaattcgctgaaggtccgatcctgatgattagctacgccgatgaaaatgaagcacgcgtcatcacctggaagaaaattgatctgccgtttgtggacgttgtctctacggaaaaggaaatgatcaaacgtttcctgaaggtcattaaggaaaaagatccggacgtgctgattacctataacggcgataattttgacttcgcgtacctgaagaaacgctgcgaaaaatttggtatcaagttcacgctgggccgtgatggtagcgacccgaaaattcagcgtatgggcgaccgctttgccgtcgaagtgaaaggtcgtatccacttcgatctgtatccggtcattctgcgcaccgtgaacctgccgacctatacgctggaagctgtttacgaagcgatctttggcaccccgaaggaaaaagtgtatccggaagaaattaccacggcatgggaaacgggcgaaggtctggaacgtgttgcgcgctactcaatggaagatgccaaagtcacctttgaactgggtcgtgaatttttcccgatggaagcgcagctgtcgcgcctggttggccaatcattttgggatgtctcgcgtagctctacgggtaatctggtggaatggttcctgctgcgtaaagcgtatgaacgcaacgaaattgcgccgaataaaccggatgaacgtgaactggcacgtcgccgtggcggttatgcaggcggttacgttaaagaaccggaacgcggcctgtgggataatatcgtctatctggactttatgagtctgtacccgtccattatcattacccataacgttagtccggacacgttcaatcgtgaaggctgcaaagaatatgataccgccccgcaggttggtcacaagttttgtaaagacgtccaaggcttcattccgagtctgctgggtgccctgctggatgaacgccagaaaatcaagaaacgtatgaaggcatccattgatccgctggaaaagaaactgctggactatcgccaaaaggcgatcaaaattctggccaactcatattacggctattacggttatgcacgcgctcgttggtactgcaaagaatgtgcagaatcggtgaccgcttggggccgtgattatattgaaaccacgatccacgaaattgaagaacgctttggtttcaaagttctgtacgctgataccgacggctttttcgcgacgatcccgggtgcggatgccgaaaccgtgaagaaaaaggctaaggaattcctgaagtacatcaacgcgaaactgccgggcctgctggaactggaatatgaaggcttctacgtccgtggctttttcgtgaccaaaaagaaatacgcggttatcgacgaagaaggcaaaattaccacgcgcggtctggaaatcgtgcgccgtgattggagtgaaattgccaaagaaacccaggcacgtgttctggaagcaattctgaaacatggtaacgtcgaagaagcggtcaaaatcgtgaaagaagttacggaaaaactgtctaactacgaaattccgccggaaaaactggccatctacgaacaaattacccgcccgctgcatgaatataaagcaatcggtccgcacgtcgcagtggcaaaacgtctggcagcacgcggcgttaaagtcaaaccgggtatggtcatcggctatattgtgctgcgtggtgatggcccgatcagcaaccgcgcaattctggctgaagaatacgatctgaaaaaacacaaatacgacgccgaatattacatcgaaaatcaggttctgccggctgtcctgcgtattctggaagcgtttggctatcgtaaagaagatctgcgctggcagaaaacccgtcaaacgggtctgacctcatggctgaatattaaaaaatcgtaa

SEQ ID NO: 211 - DNA, 2325 bp, Artificial Sequence
  Synthetic
atgatcctggacaccgattacattaccgaagatggcaagccggttatccgcattttcaagaaagacaacggcgaatttaagattgaatatgatcgcaactttgaaccgtatatttacgcactgctgcgtgatgacagcgctatcgaagatgttaaaaagattaccgcggaacgtcatggccgcgtggttaaggtgaaacgcgccgaaaaagttaaaaagaaatttctgggtcgtccggtggaagtttggaaactgtatttcacgcgtccgcaggatgtgccggcaatccgtgaccgtattcgtgcacacccggcagtcgtggatatctatgaatacgacattccgtttgcaaaacgctacctgatcgataagggcattatcccgatggaaggtgacgaagaactgaaaatgctggcatttgatattgaaaccctgtatcatgaaggcgaagaattcgctgaaggtccgatcctgatgattagctacgccgatgaaaatgaagcacgcgtcatcacctggaagaaaattgatctgccgtttgtggacgttgtctctacggaaaaggaaatgatcaaacgtttcctgaaggtcattaaggaaaaagatccggacgtgctgattacctataacggcgataattttgacttcgcgtacctgaagaaacgctgcgaaaaatttggtatcaagttcacgctgggccgtgatggtagcgacccgaaaattcagcgtatgggcgaccgctttgccgtcgaagtgaaaggtcgtatccacttcgatctgtatccggtcattctgcgcaccgtgaacctgccgacctatacgctggaagctgtttacgaagcgatctttggcaccccgaaggaaaaagtgtatccggaagaaattaccacggcatgggaaacgggcgaaggtctggaacgtgttgcgcgctactcaatggaagatgccaaagtcacctttgaactgggtcgtgaatttttcccgatggaagcgcagctgtcgcgcctggttggccaatcattttgggatgtctcgcgtagctctacgggtaatctggtggaatggttcctgctgcgtaaagcgtatgaacgcaacgaaattgcgccgaataaaccggatgaacgtgaactggcacgtcgccgtggcggttatgcaggcggttacgttaaagaaccggaacgcggcctgtgggataatatcgtctatctggactttatgagtctgtacccgtccattatcattacccataacgttagtccggacacgttcaatcgtgaaggctgcaaagaatatgataccgccccgcaggttggtcacaagttttgtaaagacgtccaaggcttcattccgagtctgctgggtgccctgctggatgaacgccagaaaatcaagaaacgtatgaaggcatccattgatccgctggaaaagaaactgctggactatcgccaaaaggcgatcaaaattctggccaactcatattacggctattacggttatgcacgcgctcgttggtactgcaaagaatgtgcagaatcggtgaccgcttggggccgtgattatattgaaaccacgatccacgaaattgaagaacgctttggtttcaaagttctgtacgctgataccgacggctttttcgcgacgatcccgggtgcggatgccgaaaccgtgaagaaaaaggctaaggaattcctgaagtacatcaacgcgaaactgccgggcctgctggaactggaatatgaaggcttctacgtccgtggctttttcgtgaccaaaaagaaatacgcggttatcgacgaagaaggcaaaattaccacgcgcggtctggaaatcgtgcgccgtgattggagtgaaattgccaaagaaacccaggcaaaagttctggaagcaatcctgaaacatggtaatgtcgaagaagcagtgaaaattgtcaaggaagtgacggaaaaactgtcgaagtatgaaatcccgccggaaaaactggtgatctacgaacaaattacccgcccgctgcatgaatataaagcgattggcccgcacgtggcagttgctaaacgtctggcagcccgcggtgtcaaagtgcgtccgggcatggtgatcggttatattgttctgcgtggcgatggtccgatcagtaaacgcgcgattctggccgaagaatttgatccgcgcaaacacaagtacgacgccgaatattacatcgaaaaccaggtgctgccggctgttctgcgtattctggaagcgttcggctatcgtaaagaagatctgcgctggcagaaaaccaagcaaacgggtctgaccgcatggctgaatgtgaaaaagaaataa

SEQ ID NO: 212 - DNA, 2328 bp, Artificial Sequence
  Synthetic
atgatcctggacaccgattacattaccgaagatggcaagccggttatccgcattttcaagaaagacaacggcgaatttaagattgaatatgatcgcaactttgaaccgtatatttacgcactgctgcgtgatgacagcgctatcgaagatgttaaaaagattaccgcggaacgtcatggccgcgtggttaaggtgaaacgcgccgaaaaagttaaaaagaaatttctgggtcgtccggtggaagtttggaaactgtatttcacgcgtccgcaggatgtgccggcaatccgtgaccgtattcgtgcacacccggcagtcgtggatatctatgaatacgacattccgtttgcaaaacgctacctgatcgataagggcattatcccgatggaaggtgacgaagaactgaaaatgctggcatttgatattgaaaccctgtatcatgaaggcgaagaattcgctgaaggtccgatcctgatgattagctacgccgatgaaaatgaagcacgcgtcatcacctggaagaaaattgatctgccgtttgtggacgttgtctctacggaaaaggaaatgatcaaacgtttcctgaaggtcattaaggaaaaagatccggacgtgctgattacctataacggcgataattttgacttcgcgtacctgaagaaacgctgcgaaaaatttggtatcaagttcacgctgggccgtgatggtagcgacccgaaaattcagcgtatgggcgaccgctttgccgtcgaagtgaaaggtcgtatccacttcgatctgtatccggtcattctgcgcaccgtgaacctgccgacctatacgctggaagctgtttacgaagcgatctttggcaccccgaaggaaaaagtgtatccggaagaaattaccacggcatgggaaacgggcgaaggtctggaacgtgttgcgcgctactcaatggaagatgccaaagtcacctttgaactgggtcgtgaatttttcccgatggaagcgcagctgtcgcgcctggttggccaatcattttgggatgtctcgcgtagctctacgggtaatctggtggaatggttcctgctgcgtaaagcgtatgaacgcaacgaactggctccgaataagccggatgaacgcgaactggttcgtcgccgtaacagctataccggcggttacgtcaaagaaccggaacgcggcctgtgggataatatcgtttatctggactttcgtagtctgtacccgtccattatcattacccataacgtgtcaccggacacgctgaatcgtgaaggctgcaaagaatatgatgaagccccgcaagtgggtcacaagttctgtaaagactttccgggcttcattccgtcgctgctgggtaacctgctggatgaacgccagaaaatcaagaaacgtatgaaggcaaccattgatccgctggaaaagaaactgctggactatcgtcaacgcgctatcaaaattctggcgaattcttattacggctattacgcgtatgcgcgtgcgcgctggtactgcaaagaatgtgccgaaagtgtgaccgcatggggccgcgaatatattgaaatgtccatccgtgaaatcgaagaaaagtacggtttcaaggttctgtacgcggataccgacggtttccacgcaacgatcccgggtgccgatgcagaaaccgtgaagaaaaaggcgatggaattcctgaagtacatcaacgctaagctgccgggtgcgctggaactggaatatgaaggcttctacaaacgtggctttttcgtgacgaaaaagaaatacgccgttatcgacgaagaaggcaaaattaccacgcgcggtctggaaatcgtgcgccgtgattggagtgaaattgccaaagaaacccaggcacgcgttctggaagcaatcctgcgtcatggtgacgtcgaagaagccgttcgcattgtcaaagatgtgacggaaaagctgtcgaaatatgaagtcccgccggaaaaactggtgatccatgaacaaattacccgtgaactgaaggattacaaagcgacgggcccgcacgttgcaattgctaaacgcctggcagcccgtggcatcaagattcgtccgggtaccgttatcagctatattgtcctgaaaggctctggtcgcatcggtgatcgtgctattccgtttgatgaattcgacccgacgaaacaccgttacgatgccgaatattacatcgaaaatcaggtgctgccggccgttgaacgcattctgaaagcatttggctataagaaagaagaactgcgctaccagaaaacccgtcaagtgggcctgggtgcgtggctgaagctgaaaggtaagaaataa

SEQ ID NO: 213 - DNA, 2322 bp, Artificial Sequence
  Synthetic
atgatcctggacaccgattacattaccgaagatggcaagccggttatccgcattttcaagaaagacaacggcgaatttaagattgaatatgatcgcaactttgaaccgtatatttacgcactgctgcgtgatgacagcgctatcgaagatgttaaaaagattaccgcggaacgtcatggccgcgtggttaaggtgaaacgcgccgaaaaagttaaaaagaaatttctgggtcgtccggtggaagtttggaaactgtatttcacgcgtccgcaggatgtgccggcaatccgtgaccgtattcgtgcacacccggcagtcgtggatatctatgaatacgacattccgtttgcaaaacgctacctgatcgataagggcattatcccgatggaaggtgacgaagaactgaaaatgctggcatttgatattgaaaccctgtatcatgaaggcgaagaattcgctgaaggtccgatcctgatgattagctacgccgatgaaaatgaagcacgcgtcatcacctggaagaaaattgatctgccgtttgtggacgttgtctctacggaaaaggaaatgatcaaacgtttcctgaaggtcattaaggaaaaagatccggacgtgctgattacctataacggcgataattttgacttcgcgtacctgaagaaacgctgcgaaaaatttggtatcaagttcacgctgggccgtgatggtagcgacccgaaaattcagcgtatgggcgaccgctttgccgtcgaagtgaaaggtcgtatccacttcgatctgtatccggtcattctgcgcaccgtgaacctgccgacctatacgctggaagctgtttacgaagcgatctttggcaccccgaaggaaaaagtgtatccggaagaaattaccacggcatgggaaacgggcgaaggtctggaacgtgttgcgcgctactcaatggaagatgccaaagtcacctttgaactgggtcgtgaatttttcccgatggaagcgcagctgtcgcgcctggttggccaatcattttgggatgtctcgcgtagctctacgggtaatctggtggaatggttcctgctgcgtaaagcgtatgaacgcaacgaactggctccgaataagccggatgaacgcgaactggttcgtcgccgtaacagctataccggcggttacgtcaaagaaccggaacgcggcctgtgggataatatcgtttatctggactttcgtagtctgtacccgtccattatcattacccataacgtgtcaccggacacgctgaatcgtgaaggctgcaaagaatatgatgaagccccgcaagtgggtcacaagttctgtaaagactttccgggcttcattccgtcgctgctgggtaacctgctggatgaacgccagaaaatcaagaaacgtatgaaggcaaccattgatccgctggaaaagaaactgctggactatcgtcaacgcgctatcaaaattctggcgaattcttattacggctattacgcgtatgcgcgtgcgcgctggtactgcaaagaatgtgccgaaagtgtgaccgcatggggccgcgaatatattgaaatgtccatccgtgaaatcgaagaaaagtacggtttcaaggttctgtacgcggataccgacggtttccacgcaacgatcccgggtgccgatgcagaaaccgtgaagaaaaaggcgatggaattcctgaagtacatcaacgctaagctgccgggtgcgctggaactggaatatgaaggcttctacaaacgtggctttttcgtgacgaaaaagaaatacgccgttatcgacgaagaaggcaaaattaccacgcgcggtctggaaatcgtgcgccgtgattggagtgaaattgccaaagaaacccaggcacgtgtcctggaagcaatcctgaaacatggtgatgtggaagaagcggttcgcattgtcaaagaagtgacggaaaagctgtcgaaatatgaagttccgccggaaaaactggtcatccatgaacaaattacccgcgatctgcgtgactacaaagccacgggtccgcacgtggcagttgcaaaacgtctggcagcccgtggcgtgaagattcgtccgggtaccgtgatcagttatattgttctgaaaggctccggtcgcatcggtgaccgtgctattccgtttgatgaattcgacccgacgaaacaccgttacgatgccgaatattacatcgaaaatcaggtcctgccggccgtggaacgcattctgaaagcatttggttatcgcaaggaagatctgcgttaccagaagaccaaacaagtcggcctgggtgcgtggctgaaagtgaaaaagtaa

SEQ ID NO: 214 - DNA, 2328 bp, Artificial Sequence
  Synthetic
atgatcctggacaccgattacattaccgaagatggcaagccggttatccgcattttcaagaaagacaacggcgaatttaagattgaatatgatcgcaactttgaaccgtatatttacgcactgctgcgtgatgacagcgctatcgaagatgttaaaaagattaccgcggaacgtcatggccgcgtggttaaggtgaaacgcgccgaaaaagttaaaaagaaatttctgggtcgtccggtggaagtttggaaactgtatttcacgcgtccgcaggatgtgccggcaatccgtgaccgtattcgtgcacacccggcagtcgtggatatctatgaatacgacattccgtttgcaaaacgctacctgatcgataagggcattatcccgatggaaggtgacgaagaactgaaaatgctggcatttgatattgaaaccctgtatcatgaaggcgaagaattcgctgaaggtccgatcctgatgattagctacgccgatgaaaatgaagcacgcgtcatcacctggaagaaaattgatctgccgtttgtggacgttgtctctacggaaaaggaaatgatcaaacgtttcctgaaggtcattaaggaaaaagatccggacgtgctgattacctataacggcgataattttgacttcgcgtacctgaagaaacgctgcgaaaaatttggtatcaagttcacgctgggccgtgatggtagcgacccgaaaattcagcgtatgggcgaccgctttgccgtcgaagtgaaaggtcgtatccacttcgatctgtatccggtcattctgcgcaccgtgaacctgccgacctatacgctggaagctgtttacgaagcgatctttggcaccccgaaggaaaaagtgtatccggaagaaattaccacggcatgggaaacgggcgaaggtctggaacgtgttgcgcgctactcaatggaagatgccaaagtcacctttgaactgggtcgtgaatttttcccgatggaagcgcagctgtcgcgcctggttggccaatcattttgggatgtctcgcgtagctctacgggtaatctggtggaatggttcctgctgcgtaaagcgtatgaacgcaacgaactggctccgaataagccggatgaacgcgaactggttcgtcgccgtaacagctataccggcggttacgtcaaagaaccggaacgcggcctgtgggataatatcgtttatctggactttcgtagtctgtacccgtccattatcattacccataacgtgtcaccggacacgctgaatcgtgaaggctgcaaagaatatgatgaagccccgcaagtgggtcacaagttctgtaaagactttccgggcttcattccgtcgctgctgggtaacctgctggatgaacgccagaaaatcaagaaacgtatgaaggcaaccattgatccgctggaaaagaaactgctggactatcgtcaacgcgctatcaaaattctggcgaattcttattacggctattacgcgtatgcgcgtgcgcgctggtactgcaaagaatgtgccgaaagtgtgaccgcatggggccgcgaatatattgaaatgtccatccgtgaaatcgaagaaaagtacggtttcaaggttctgtacgcggataccgacggtttccacgcaacgatcccgggtgccgatgcagaaaccgtgaagaaaaaggcgatggaattcctgaagtacatcaacgctaagctgccgggtgcgctggaactggaatatgaaggcttctacaaacgtggctttttcgtgacgaaaaagaaatacgccgttatcgacgaagaaggcaaaattaccacgcgcggtctggaaatcgtgcgccgtgattggagtgaaattgccaaagaaacccaggcacgtgtgctggaagctctgctgaaagatggcaatgttgaagaagcggtttccattgtcaaagaagtgacggaaaagctgggtaaatatgaagtcccgccggaaaaactggtgatccatgaacaaattacccgcgaactgaaggattacaaagcgacgggcccgcacgttgctatcgcgaaacgtctggcagcgcgtggcgtgaagattcgtccgggtaccgttatcagctatattgtcctgaaaggctctggtcgtatcggtgaccgcgcgattccgtttgatgaattcgacccgacgaaacatcgctacgatgcagaatattacatcgaaaaccaggttctgccggctgtcgaacgtattctgaaagcgtttggctatcgtgccgaagatctgcgctaccagaaaacccgtcaagtgggcctgggtgtttggctgcaaccgaaaggtaagaaataa

SEQ ID NO: 215 - DNA, 2325 bp, Artificial Sequence
  Synthetic
atgatcctggacaccgattacattaccgaagatggcaagccggttatccgcattttcaagaaagacaacggcgaatttaagattgaatatgatcgcaactttgaaccgtatatttacgcactgctgcgtgatgacagcgctatcgaagatgttaaaaagattaccgcggaacgtcatggccgcgtggttaaggtgaaacgcgccgaaaaagttaaaaagaaatttctgggtcgtccggtggaagtttggaaactgtatttcacgcgtccgcaggatgtgccggcaatccgtgaccgtattcgtgcacacccggcagtcgtggatatctatgaatacgacattccgtttgcaaaacgctacctgatcgataagggcattatcccgatggaaggtgacgaagaactgaaaatgctggcatttgatattgaaaccctgtatcatgaaggcgaagaattcgctgaaggtccgatcctgatgattagctacgccgatgaaaatgaagcacgcgtcatcacctggaagaaaattgatctgccgtttgtggacgttgtctctacggaaaaggaaatgatcaaacgtttcctgaaggtcattaaggaaaaagatccggacgtgctgattacctataacggcgataattttgacttcgcgtacctgaagaaacgctgcgaaaaatttggtatcaagttcacgctgggccgtgatggtagcgacccgaaaattcagcgtatgggcgaccgctttgccgtcgaagtgaaaggtcgtatccacttcgatctgtatccggtcattctgcgcaccgtgaacctgccgacctatacgctggaagctgtttacgaagcgatctttggcaccccgaaggaaaaagtgtatccggaagaaattaccacggcatgggaaacgggcgaaggtctggaacgtgttgcgcgctactcaatggaagatgccaaagtcacctttgaactgggtcgtgaatttttcccgatggaagcgcagctgtcgcgcctggttggccaatcattttgggatgtctcgcgtagctctacgggtaatctggtggaatggttcctgctgcgtaaagcgtatgaacgcaacgaactggctccgaataagccggatgaacgcgaactggttcgtcgccgtaacagctataccggcggttacgtcaaagaaccggaacgcggcctgtgggataatatcgtttatctggactttcgtagtctgtacccgtccattatcattacccataacgtgtcaccggacacgctgaatcgtgaaggctgcaaagaatatgatgaagccccgcaagtgggtcacaagttctgtaaagactttccgggcttcattccgtcgctgctgggtaacctgctggatgaacgccagaaaatcaagaaacgtatgaaggcaaccattgatccgctggaaaagaaactgctggactatcgtcaacgcgctatcaaaattctggcgaattcttattacggctattacgcgtatgcgcgtgcgcgctggtactgcaaagaatgtgccgaaagtgtgaccgcatggggccgcgaatatattgaaatgtccatccgtgaaatcgaagaaaagtacggtttcaaggttctgtacgcggataccgacggtttccacgcaacgatcccgggtgccgatgcagaaaccgtgaagaaaaaggcgatggaattcctgaagtacatcaacgctaagctgccgggtgcgctggaactggaatatgaaggcttctacaaacgtggctttttcgtgacgaaaaagaaatacgccgttatcgacgaagaaggcaaaattaccacgcgcggtctggaaatcgtgcgccgtgattggagtgaaattgccaaagaaacccaggcaaaggttctggaagcaattctgaaacatggtaacgtcgaagaagcggtcaagatcgtgaaagaagttaccgaaaaactgtcgaattatgaaattccggtcgaaaagctggtgatctacgaacaaattacgcgcccgctgaacgaatataaagccattggcccgcacgtggcagttgctaaacgtctggcggccaagggtatcaagattaaaccgggcatggtgattggttatgttgtcctgcgcggcgatggtccgatcagcaaacgtgcgatcgccatcgaagaattcgatggcaaaaagcataagtacgacgcagaatactacatcgaaaatcaggttctgccggccgtcgaacgtatcctgaaagcattcggttataagcgtgaagatctgcgctggcagaagaccaaacaagtgggcctgggtgcgtggctgaaagttaaaaagtcttaa

SEQ ID NO: 216 - DNA, 2328 bp, Artificial Sequence
  Synthetic
atgatcctggacaccgattacattaccgaagatggcaagccggttatccgcattttcaagaaagacaacggcgaatttaagattgaatatgatcgcaactttgaaccgtatatttacgcactgctgcgtgatgacagcgctatcgaagatgttaaaaagattaccgcggaacgtcatggccgcgtggttaaggtgaaacgcgccgaaaaagttaaaaagaaatttctgggtcgtccggtggaagtttggaaactgtatttcacgcgtccgcaggatgtgccggcaatccgtgaccgtattcgtgcacacccggcagtcgtggatatctatgaatacgacattccgtttgcaaaacgctacctgatcgataagggcattatcccgatggaaggtgacgaagaactgaaaatgctggcatttgatattgaaaccctgtatcatgaaggcgaagaattcgctgaaggtccgatcctgatgattagctacgccgatgaaaatgaagcacgcgtcatcacctggaagaaaattgatctgccgtttgtggacgttgtctctacggaaaaggaaatgatcaaacgtttcctgaaggtcattaaggaaaaagatccggacgtgctgattacctataacggcgataattttgacttcgcgtacctgaagaaacgctgcgaaaaatttggtatcaagttcacgctgggccgtgatggtagcgacccgaaaattcagcgtatgggcgaccgctttgccgtcgaagtgaaaggtcgtatccacttcgatctgtatccggtcattctgcgcaccgtgaacctgccgacctatacgctggaagctgtttacgaagcgatctttggcaccccgaaggaaaaagtgtatccggaagaaattaccacggcatgggaaacgggcgaaggtctggaacgtgttgcgcgctactcaatggaagatgccaaagtcacctttgaactgggtcgtgaatttttcccgatggaagcgcagctgtcgcgcctggttggccaatcattttgggatgtctcgcgtagctctacgggtaatctggtggaatggttcctgctgcgtaaagcgtatgaacgcaacgaactggctccgaataagccggatgaacgcgaactggttcgtcgccgtaacagctataccggcggttacgtcaaagaaccggaacgcggcctgtgggataatatcgtttatctggactttcgtagtctgtacccgtccattatcattacccataacgtgtcaccggacacgctgaatcgtgaaggctgcaaagaatatgatgaagccccgcaagtgggtcacaagttctgtaaagactttccgggcttcattccgtcgctgctgggtaacctgctggatgaacgccagaaaatcaagaaacgtatgaaggcaaccattgatccgctggaaaagaaactgctggactatcgtcaacgcgctatcaaaattctggcgaattcttattacggctattacgcgtatgcgcgtgcgcgctggtactgcaaagaatgtgccgaaagtgtgaccgcatggggccgcgaatatattgaaatgtccatccgtgaaatcgaagaaaagtacggtttcaaggttctgtacgcggataccgacggtttccacgcaacgatcccgggtgccgatgcagaaaccgtgaagaaaaaggcgatggaattcctgaagtacatcaacgctaagctgccgggtgcgctggaactggaatatgaaggcttctacaaacgtggctttttcgtgacgaaaaagaaatacgccgttatcgacgaagaaggcaaaattaccacgcgcggtctggaaatcgtgcgccgtgattggagtgaaattgccaaagaaacccaggcacgtgttctggaagcactgctgaaagatggtaatgtcgaagaagcagtgagtattgttaaagaagtcacggaaaaactgtccaagtatgaagtcccgccggaaaaactggtgattcatgaacaaatcacccgcgaactgaaagattacaaggcgacgggcccgcacgtggcaattgctaaacgtctggcagcgcgtggcgttaagatccgtccgggtaccgttattagctatatcgtcctgaaaggctctggtcgtattggtgaccgcgccatcccgtttgatgaattcgacccggctaaacaccgctacgatgcggaatattacattgaaaatcaggtcctgccggctgtggaacgtatcctgaaagcgtttggctatcgtaaggaagatctgcgctaccagaaaacccgtcaagtgggcctgggtgcgtggctgaaaccgaagggtaaaaagtaa

SEQ ID NO: 217 - DNA, 2328 bp, Artificial Sequence
  Synthetic
atgatcctggacaccgattacattaccgaagatggcaagccggttatccgcattttcaagaaagacaacggcgaatttaagattgaatatgatcgcaactttgaaccgtatatttacgcactgctgcgtgatgacagcgctatcgaagatgttaaaaagattaccgcggaacgtcatggccgcgtggttaaggtgaaacgcgccgaaaaagttaaaaagaaatttctgggtcgtccggtggaagtttggaaactgtatttcacgcgtccgcaggatgtgccggcaatccgtgaccgtattcgtgcacacccggcagtcgtggatatctatgaatacgacattccgtttgcaaaacgctacctgatcgataagggcattatcccgatggaaggtgacgaagaactgaaaatgctggcatttgatattgaaaccctgtatcatgaaggcgaagaattcgctgaaggtccgatcctgatgattagctacgccgatgaaaatgaagcacgcgtcatcacctggaagaaaattgatctgccgtttgtggacgttgtctctacggaaaaggaaatgatcaaacgtttcctgaaggtcattaaggaaaaagatccggacgtgctgattacctataacggcgataattttgacttcgcgtacctgaagaaacgctgcgaaaaatttggtatcaagttcacgctgggccgtgatggtagcgacccgaaaattcagcgtatgggcgaccgctttgccgtcgaagtgaaaggtcgtatccacttcgatctgtatccggtcattctgcgcaccgtgaacctgccgacctatacgctggaagctgtttacgaagcgatctttggcaccccgaaggaaaaagtgtatccggaagaaattaccacggcatgggaaacgggcgaaggtctggaacgtgttgcgcgctactcaatggaagatgccaaagtcacctttgaactgggtcgtgaatttttcccgatggaagcgcagctgtcgcgcctggttggccaatcattttgggatgtctcgcgtagctctacgggtaatctggtggaatggttcctgctgcgtaaagcgtatgaacgcaacgaactggctccgaataagccggatgaacgcgaactggttcgtcgccgtaacagctataccggcggttacgtcaaagaaccggaacgcggcctgtgggataatatcgtttatctggactttcgtagtctgtacccgtccattatcattacccataacgtgtcaccggacacgctgaatcgtgaaggctgcaaagaatatgatgaagccccgcaagtgggtcacaagttctgtaaagactttccgggcttcattccgtcgctgctgggtaacctgctggatgaacgccagaaaatcaagaaacgtatgaaggcaaccattgatccgctggaaaagaaactgctggactatcgtcaacgcgctatcaaaattctggcgaattcttattacggctattacgcgtatgcgcgtgcgcgctggtactgcaaagaatgtgccgaaagtgtgaccgcatggggccgcgaatatattgaaatgtccatccgtgaaatcgaagaaaagtacggtttcaaggttctgtacgcggataccgacggtttccacgcaacgatcccgggtgccgatgcagaaaccgtgaagaaaaaggcgatggaattcctgaagtacatcaacgctaagctgccgggtgcgctggaactggaatatgaaggcttctacaaacgtggctttttcgtgacgaaaaagaaatacgccgttatcgacgaagaaggcaaaattaccacgcgcggtctggaaatcgtgcgccgtgattggagtgaaattgccaaagaaacccaggcacgcgtcctggaagcaatcctgaaagatggtgacgtggaagaagccgtccgtattgtgaaagaagttacggaaaaactgtccaaatatgaagttccgccggaaaaactggtcatccatgaacaaattacccgcgaactgaaagattacaaagcgacgggcccgcacgtcgcaatcgctaaacgtctggcggcgcgtggcgtgaaaattcgtccgggtaccgtgatctcatatattgttctgaaaggctcgggtcgtatcggtgaccgcgctattccgtttgatgaattcgacccgaaaaaacacaaatacgatgcggaatactacatcgaaaaccaggttctgccggccgtcgaacgtattctgcgcgcatttggctaccgtaaagaagatctgcgttatcaaaaaaccaaacaagtgggtctgggtgcgtggctgaaaccgaaaggtaaaaaataa

SEQ ID NO: 218 - DNA, 2325 bp, Artificial Sequence
  Synthetic
atgatcctggacaccgattacattaccgaagatggcaagccggttatccgcattttcaagaaagacaacggcgaatttaagattgaatatgatcgcaactttgaaccgtatatttacgcactgctgcgtgatgacagcgctatcgaagatgttaaaaagattaccgcggaacgtcatggccgcgtggttaaggtgaaacgcgccgaaaaagttaaaaagaaatttctgggtcgtccggtggaagtttggaaactgtatttcacgcgtccgcaggatgtgccggcaatccgtgaccgtattcgtgcacacccggcagtcgtggatatctatgaatacgacattccgtttgcaaaacgctacctgatcgataagggcattatcccgatggaaggtgacgaagaactgaaaatgctggcatttgatattgaaaccctgtatcatgaaggcgaagaattcgctgaaggtccgatcctgatgattagctacgccgatgaaaatgaagcacgcgtcatcacctggaagaaaattgatctgccgtttgtggacgttgtctctacggaaaaggaaatgatcaaacgtttcctgaaggtcattaaggaaaaagatccggacgtgctgattacctataacggcgataattttgacttcgcgtacctgaagaaacgctgcgaaaaatttggtatcaagttcacgctgggccgtgatggtagcgacccgaaaattcagcgtatgggcgaccgctttgccgtcgaagtgaaaggtcgtatccacttcgatctgtatccggtcattctgcgcaccgtgaacctgccgacctatacgctggaagctgtttacgaagcgatctttggcaccccgaaggaaaaagtgtatccggaagaaattaccacggcatgggaaacgggcgaaggtctggaacgtgttgcgcgctactcaatggaagatgccaaagtcacctttgaactgggtcgtgaatttttcccgatggaagcgcagctgtcgcgcctggttggccaatcattttgggatgtctcgcgtagctctacgggtaatctggtggaatggttcctgctgcgtaaagcgtatgaacgcaacgaactggctccgaataagccggatgaacgcgaactggttcgtcgccgtaacagctataccggcggttacgtcaaagaaccggaacgcggcctgtgggataatatcgtttatctggactttcgtagtctgtacccgtccattatcattacccataacgtgtcaccggacacgctgaatcgtgaaggctgcaaagaatatgatgaagccccgcaagtgggtcacaagttctgtaaagactttccgggcttcattccgtcgctgctgggtaacctgctggatgaacgccagaaaatcaagaaacgtatgaaggcaaccattgatccgctggaaaagaaactgctggactatcgtcaacgcgctatcaaaattctggcgaattcttattacggctattacgcgtatgcgcgtgcgcgctggtactgcaaagaatgtgccgaaagtgtgaccgcatggggccgcgaatatattgaaatgtccatccgtgaaatcgaagaaaagtacggtttcaaggttctgtacgcggataccgacggtttccacgcaacgatcccgggtgccgatgcagaaaccgtgaagaaaaaggcgatggaattcctgaagtacatcaacgctaagctgccgggtgcgctggaactggaatatgaaggcttctacaaacgtggctttttcgtgacgaaaaagaaatacgccgttatcgacgaagaaggcaaaattaccacgcgcggtctggaaatcgtgcgccgtgattggagtgaaattgccaaagaaacccaggcacgtgttctggaagcaattctgaaacatggtaacgtcgaagaagcggtcaaaatcgtgaaagaagttacggaaaaactgtctaactacgaaattccgccggaaaaactggccatctacgaacaaattacccgcccgctgcatgaatataaagcaatcggtccgcacgtcgcagtggcaaaacgtctggcagcacgcggcgttaaagtcaaaccgggtatggtcatcggctatattgtgctgcgtggtgatggcccgatcagcaaccgcgcaattctggctgaagaatacgatctgaaaaaacacaaatacgacgccgaatattacatcgaaaatcaggttctgccggctgtcctgcgtattctggaagcgtttggctatcgtaaagaagatctgcgctggcagaaaacccgtcaaacgggtctgacctcatggctgaatattaaaaaatcgtaa

SEQ ID NO: 219 - DNA, 2325 bp, Artificial Sequence
  Synthetic
atgatcctggacaccgattacattaccgaagatggcaagccggttatccgcattttcaagaaagacaacggcgaatttaagattgaatatgatcgcaactttgaaccgtatatttacgcactgctgcgtgatgacagcgctatcgaagatgttaaaaagattaccgcggaacgtcatggccgcgtggttaaggtgaaacgcgccgaaaaagttaaaaagaaatttctgggtcgtccggtggaagtttggaaactgtatttcacgcgtccgcaggatgtgccggcaatccgtgaccgtattcgtgcacacccggcagtcgtggatatctatgaatacgacattccgtttgcaaaacgctacctgatcgataagggcattatcccgatggaaggtgacgaagaactgaaaatgctggcatttgatattgaaaccctgtatcatgaaggcgaagaattcgctgaaggtccgatcctgatgattagctacgccgatgaaaatgaagcacgcgtcatcacctggaagaaaattgatctgccgtttgtggacgttgtctctacggaaaaggaaatgatcaaacgtttcctgaaggtcattaaggaaaaagatccggacgtgctgattacctataacggcgataattttgacttcgcgtacctgaagaaacgctgcgaaaaatttggtatcaagttcacgctgggccgtgatggtagcgacccgaaaattcagcgtatgggcgaccgctttgccgtcgaagtgaaaggtcgtatccacttcgatctgtatccggtcattctgcgcaccgtgaacctgccgacctatacgctggaagctgtttacgaagcgatctttggcaccccgaaggaaaaagtgtatccggaagaaattaccacggcatgggaaacgggcgaaggtctggaacgtgttgcgcgctactcaatggaagatgccaaagtcacctttgaactgggtcgtgaatttttcccgatggaagcgcagctgtcgcgcctggttggccaatcattttgggatgtctcgcgtagctctacgggtaatctggtggaatggttcctgctgcgtaaagcgtatgaacgcaacgaactggctccgaataagccggatgaacgcgaactggttcgtcgccgtaacagctataccggcggttacgtcaaagaaccggaacgcggcctgtgggataatatcgtttatctggactttcgtagtctgtacccgtccattatcattacccataacgtgtcaccggacacgctgaatcgtgaaggctgcaaagaatatgatgaagccccgcaagtgggtcacaagttctgtaaagactttccgggcttcattccgtcgctgctgggtaacctgctggatgaacgccagaaaatcaagaaacgtatgaaggcaaccattgatccgctggaaaagaaactgctggactatcgtcaacgcgctatcaaaattctggcgaattcttattacggctattacgcgtatgcgcgtgcgcgctggtactgcaaagaatgtgccgaaagtgtgaccgcatggggccgcgaatatattgaaatgtccatccgtgaaatcgaagaaaagtacggtttcaaggttctgtacgcggataccgacggtttccacgcaacgatcccgggtgccgatgcagaaaccgtgaagaaaaaggcgatggaattcctgaagtacatcaacgctaagctgccgggtgcgctggaactggaatatgaaggcttctacaaacgtggctttttcgtgacgaaaaagaaatacgccgttatcgacgaagaaggcaaaattaccacgcgcggtctggaaatcgtgcgccgtgattggagtgaaattgccaaagaaacccaggcaaaagttctggaagcaatcctgaaacatggtaatgtcgaagaagcagtgaaaattgtcaaggaagtgacggaaaaactgtcgaagtatgaaatcccgccggaaaaactggtgatctacgaacaaattacccgcccgctgcatgaatataaagcgattggcccgcacgtggcagttgctaaacgtctggcagcccgcggtgtcaaagtgcgtccgggcatggtgatcggttatattgttctgcgtggcgatggtccgatcagtaaacgcgcgattctggccgaagaatttgatccgcgcaaacacaagtacgacgccgaatattacatcgaaaaccaggtgctgccggctgttctgcgtattctggaagcgttcggctatcgtaaagaagatctgcgctggcagaaaaccaagcaaacgggtctgaccgcatggctgaatgtgaaaaagaaataa

SEQ ID NO: 220 - DNA, 2328 bp, Artificial Sequence
  Synthetic
atgattctggacgctgactatattacggaaaatggcaagccggttgtgcgcatcttcaaaaaggaaaatggcgaattcaaggtggaatatgatcgcaactttgaaccgtatatttacgccctgctgaaagatgacagtgcaatcgaagaaattaaaaagatcaccgccgaacgccatggcaccgtggttcgtatcacgaaagcagaaaaggttgaacgtaaatttctgggtcgcccggtggaagtttggaaactgtatttcacgcatccgcaggatgtgccggccattcgtgacaaaatccgctctcacccggcagtcgtggatatttatgaatacgacatcccgtttgccaaacgttatctgattgataagggcctggttccgatggaaggtgacgaagaactgaaaatgctggcttttgatatcgaaaccctgtatcacgaaggcgaagaattcgcggaaggtccgattctgatgatctcatacgcagacgaatcggaagctcgcgtgattacctggaaaaaggttgatctgccgtatgttgacgctgtcagcacggaaaaagatatgattaaggcgtttctgcgtgttgtcaaagaaaaggatccggacgttctgatcacctataacggcgataattttgacttcgcttacctgaaaaagcgctgcgaaaaactgggtgtgaagttcattctgggccgtgacggttctgaaccgaaaatccagcgtatgggcgatcgctttgcagtcgacgtgaaaggtcgcattcatttcgatctgtatccggtgattcgtcgcaccatcaacctgccgacctatacgctggaagcggtctacgaagccatttttggccgtccgaaagaaaaggtgtatgccgaagaaatcgcacaagcttgggaaaccaatgaaggcctggaacgtgtcgctcgctatagcatggaagatgcgaaagtgacgtacgaactgggcaaggaatttttcccgatggaagcgcagctgtcacgcctgattggccaaccgctgtgggatgtgtcgcgtagctctaccggtaacctggttgaatggttcctgctgcgtaaagcgtatgaacgcaacgaactggcaccgaataaaccgtccggccgcgaatacgatgaacgtcgcggcggttatgcgggcggttacgttaaagaaccggaaaagggtctgtgggaaaacatcgtctacctggattacaagagtctgtatccgtccattatcattacccataacgttagtccggacacgctgaatcgcgaaggctgcaaagaatacgatgtggcgccgcaggttggtcaccgtttttgtaaagactttccgggcttcattccgtccctgctgggtgatctgctggaagaacgtcagaaaatcaagcgcaaaatgaaggccaccattgatccgatcgaacgtcgcctgctggactatcgtcaacgcgcgatcaaaattctggccaacagctattacggctattacggttatgcgcgtgcccgctggtactgcaaagaatgtgcagaaagcgttacggcttggggccgcgaatacatcgaaatgtctatccgtgaaatcgaagaaaagtacggtttcaaggtgctgtacgctgataccgacggcttccatgcgacgattccgggtgaagatgccgaaaccatcaaaaagaaagcaatggaattcctgaagtacatcaactcaaagctgccgggcgccctggaactggaatatgaaggcttctaccgtcgcggctttttcgttacgaagaaaaagtacgcagtcattgacgaagaaggcaaaatcaccacgcgcggtctggaaattgtgcgtcgcgattggagtgaaattgccaaagaaacccaggcacgcgttctggaagcaatcctgcgtcatggtgacgtcgaagaagccgttcgcattgtcaaagatgtgacggaaaagctgtcgaaatatgaagtcccgccggaaaaactggtgatccatgaacaaattacccgtgaactgaaggattacaaagcgacgggcccgcacgttgcaattgctaaacgcctggcagcccgtggcatcaagattcgtccgggtaccgttatcagctatattgtcctgaaaggctctggtcgcatcggtgatcgtgctattccgtttgatgaattcgacccgacgaaacaccgttacgatgccgaatattacatcgaaaatcaggtgctgccggccgttgaacgcattctgaaagcatttggctataagaaagaagaactgcgctaccagaaaacccgtcaagtgggcctgggtgcgtggctgaagctgaaaggtaagaaataa

SEQ ID NO: 221 - DNA, 2322 bp, Artificial Sequence
  Synthetic
atgattctggacgctgactatattacggaaaatggcaagccggttgtgcgcatcttcaaaaaggaaaatggcgaattcaaggtggaatatgatcgcaactttgaaccgtatatttacgccctgctgaaagatgacagtgcaatcgaagaaattaaaaagatcaccgccgaacgccatggcaccgtggttcgtatcacgaaagcagaaaaggttgaacgtaaatttctgggtcgcccggtggaagtttggaaactgtatttcacgcatccgcaggatgtgccggccattcgtgacaaaatccgctctcacccggcagtcgtggatatttatgaatacgacatcccgtttgccaaacgttatctgattgataagggcctggttccgatggaaggtgacgaagaactgaaaatgctggcttttgatatcgaaaccctgtatcacgaaggcgaagaattcgcggaaggtccgattctgatgatctcatacgcagacgaatcggaagctcgcgtgattacctggaaaaaggttgatctgccgtatgttgacgctgtcagcacggaaaaagatatgattaaggcgtttctgcgtgttgtcaaagaaaaggatccggacgttctgatcacctataacggcgataattttgacttcgcttacctgaaaaagcgctgcgaaaaactgggtgtgaagttcattctgggccgtgacggttctgaaccgaaaatccagcgtatgggcgatcgctttgcagtcgacgtgaaaggtcgcattcatttcgatctgtatccggtgattcgtcgcaccatcaacctgccgacctatacgctggaagcggtctacgaagccatttttggccgtccgaaagaaaaggtgtatgccgaagaaatcgcacaagcttgggaaaccaatgaaggcctggaacgtgtcgctcgctatagcatggaagatgcgaaagtgacgtacgaactgggcaaggaatttttcccgatggaagcgcagctgtcacgcctgattggccaaccgctgtgggatgtgtcgcgtagctctaccggtaacctggttgaatggttcctgctgcgtaaagcgtatgaacgcaacgaactggcaccgaataaaccgtccggccgcgaatacgatgaacgtcgcggcggttatgcgggcggttacgttaaagaaccggaaaagggtctgtgggaaaacatcgtctacctggattacaagagtctgtatccgtccattatcattacccataacgttagtccggacacgctgaatcgcgaaggctgcaaagaatacgatgtggcgccgcaggttggtcaccgtttttgtaaagactttccgggcttcattccgtccctgctgggtgatctgctggaagaacgtcagaaaatcaagcgcaaaatgaaggccaccattgatccgatcgaacgtcgcctgctggactatcgtcaacgcgcgatcaaaattctggccaacagctattacggctattacggttatgcgcgtgcccgctggtactgcaaagaatgtgcagaaagcgttacggcttggggccgcgaatacatcgaaatgtctatccgtgaaatcgaagaaaagtacggtttcaaggtgctgtacgctgataccgacggcttccatgcgacgattccgggtgaagatgccgaaaccatcaaaaagaaagcaatggaattcctgaagtacatcaactcaaagctgccgggcgccctggaactggaatatgaaggcttctaccgtcgcggctttttcgttacgaagaaaaagtacgcagtcattgacgaagaaggcaaaatcaccacgcgcggtctggaaattgtgcgtcgcgattggagtgaaattgccaaagaaacccaggcacgtgtcctggaagcaatcctgaaacatggtgatgtggaagaagcggttcgcattgtcaaagaagtgacggaaaagctgtcgaaatatgaagttccgccggaaaaactggtcatccatgaacaaattacccgcgatctgcgtgactacaaagccacgggtccgcacgtggcagttgcaaaacgtctggcagcccgtggcgtgaagattcgtccgggtaccgtgatcagttatattgttctgaaaggctccggtcgcatcggtgaccgtgctattccgtttgatgaattcgacccgacgaaacaccgttacgatgccgaatattacatcgaaaatcaggtcctgccggccgtggaacgcattctgaaagcatttggttatcgcaaggaagatctgcgttaccagaagaccaaacaagtcggcctgggtgcgtggctgaaagtgaaaaagtaa

SEQ ID NO: 222 - DNA, 2328 bp, Artificial Sequence
  Synthetic
atgattctggacgctgactatattacggaaaatggcaagccggttgtgcgcatcttcaaaaaggaaaatggcgaattcaaggtggaatatgatcgcaactttgaaccgtatatttacgccctgctgaaagatgacagtgcaatcgaagaaattaaaaagatcaccgccgaacgccatggcaccgtggttcgtatcacgaaagcagaaaaggttgaacgtaaatttctgggtcgcccggtggaagtttggaaactgtatttcacgcatccgcaggatgtgccggccattcgtgacaaaatccgctctcacccggcagtcgtggatatttatgaatacgacatcccgtttgccaaacgttatctgattgataagggcctggttccgatggaaggtgacgaagaactgaaaatgctggcttttgatatcgaaaccctgtatcacgaaggcgaagaattcgcggaaggtccgattctgatgatctcatacgcagacgaatcggaagctcgcgtgattacctggaaaaaggttgatctgccgtatgttgacgctgtcagcacggaaaaagatatgattaaggcgtttctgcgtgttgtcaaagaaaaggatccggacgttctgatcacctataacggcgataattttgacttcgcttacctgaaaaagcgctgcgaaaaactgggtgtgaagttcattctgggccgtgacggttctgaaccgaaaatccagcgtatgggcgatcgctttgcagtcgacgtgaaaggtcgcattcatttcgatctgtatccggtgattcgtcgcaccatcaacctgccgacctatacgctggaagcggtctacgaagccatttttggccgtccgaaagaaaaggtgtatgccgaagaaatcgcacaagcttgggaaaccaatgaaggcctggaacgtgtcgctcgctatagcatggaagatgcgaaagtgacgtacgaactgggcaaggaatttttcccgatggaagcgcagctgtcacgcctgattggccaaccgctgtgggatgtgtcgcgtagctctaccggtaacctggttgaatggttcctgctgcgtaaagcgtatgaacgcaacgaactggcaccgaataaaccgtccggccgcgaatacgatgaacgtcgcggcggttatgcgggcggttacgttaaagaaccggaaaagggtctgtgggaaaacatcgtctacctggattacaagagtctgtatccgtccattatcattacccataacgttagtccggacacgctgaatcgcgaaggctgcaaagaatacgatgtggcgccgcaggttggtcaccgtttttgtaaagactttccgggcttcattccgtccctgctgggtgatctgctggaagaacgtcagaaaatcaagcgcaaaatgaaggccaccattgatccgatcgaacgtcgcctgctggactatcgtcaacgcgcgatcaaaattctggccaacagctattacggctattacggttatgcgcgtgcccgctggtactgcaaagaatgtgcagaaagcgttacggcttggggccgcgaatacatcgaaatgtctatccgtgaaatcgaagaaaagtacggtttcaaggtgctgtacgctgataccgacggcttccatgcgacgattccgggtgaagatgccgaaaccatcaaaaagaaagcaatggaattcctgaagtacatcaactcaaagctgccgggcgccctggaactggaatatgaaggcttctaccgtcgcggctttttcgttacgaagaaaaagtacgcagtcattgacgaagaaggcaaaatcaccacgcgcggtctggaaattgtgcgtcgcgattggagtgaaattgccaaagaaacccaggcacgtgtgctggaagctctgctgaaagatggcaatgttgaagaagcggtttccattgtcaaagaagtgacggaaaagctgggtaaatatgaagtcccgccggaaaaactggtgatccatgaacaaattacccgcgaactgaaggattacaaagcgacgggcccgcacgttgctatcgcgaaacgtctggcagcgcgtggcgtgaagattcgtccgggtaccgttatcagctatattgtcctgaaaggctctggtcgtatcggtgaccgcgcgattccgtttgatgaattcgacccgacgaaacatcgctacgatgcagaatattacatcgaaaaccaggttctgccggctgtcgaacgtattctgaaagcgtttggctatcgtgccgaagatctgcgctaccagaaaacccgtcaagtgggcctgggtgtttggctgcaaccgaaaggtaagaaataa

SEQ ID NO: 223 - DNA, 2325 bp, Artificial Sequence
  Synthetic
atgattctggacgctgactatattacggaaaatggcaagccggttgtgcgcatcttcaaaaaggaaaatggcgaattcaaggtggaatatgatcgcaactttgaaccgtatatttacgccctgctgaaagatgacagtgcaatcgaagaaattaaaaagatcaccgccgaacgccatggcaccgtggttcgtatcacgaaagcagaaaaggttgaacgtaaatttctgggtcgcccggtggaagtttggaaactgtatttcacgcatccgcaggatgtgccggccattcgtgacaaaatccgctctcacccggcagtcgtggatatttatgaatacgacatcccgtttgccaaacgttatctgattgataagggcctggttccgatggaaggtgacgaagaactgaaaatgctggcttttgatatcgaaaccctgtatcacgaaggcgaagaattcgcggaaggtccgattctgatgatctcatacgcagacgaatcggaagctcgcgtgattacctggaaaaaggttgatctgccgtatgttgacgctgtcagcacggaaaaagatatgattaaggcgtttctgcgtgttgtcaaagaaaaggatccggacgttctgatcacctataacggcgataattttgacttcgcttacctgaaaaagcgctgcgaaaaactgggtgtgaagttcattctgggccgtgacggttctgaaccgaaaatccagcgtatgggcgatcgctttgcagtcgacgtgaaaggtcgcattcatttcgatctgtatccggtgattcgtcgcaccatcaacctgccgacctatacgctggaagcggtctacgaagccatttttggccgtccgaaagaaaaggtgtatgccgaagaaatcgcacaagcttgggaaaccaatgaaggcctggaacgtgtcgctcgctatagcatggaagatgcgaaagtgacgtacgaactgggcaaggaatttttcccgatggaagcgcagctgtcacgcctgattggccaaccgctgtgggatgtgtcgcgtagctctaccggtaacctggttgaatggttcctgctgcgtaaagcgtatgaacgcaacgaactggcaccgaataaaccgtccggccgcgaatacgatgaacgtcgcggcggttatgcgggcggttacgttaaagaaccggaaaagggtctgtgggaaaacatcgtctacctggattacaagagtctgtatccgtccattatcattacccataacgttagtccggacacgctgaatcgcgaaggctgcaaagaatacgatgtggcgccgcaggttggtcaccgtttttgtaaagactttccgggcttcattccgtccctgctgggtgatctgctggaagaacgtcagaaaatcaagcgcaaaatgaaggccaccattgatccgatcgaacgtcgcctgctggactatcgtcaacgcgcgatcaaaattctggccaacagctattacggctattacggttatgcgcgtgcccgctggtactgcaaagaatgtgcagaaagcgttacggcttggggccgcgaatacatcgaaatgtctatccgtgaaatcgaagaaaagtacggtttcaaggtgctgtacgctgataccgacggcttccatgcgacgattccgggtgaagatgccgaaaccatcaaaaagaaagcaatggaattcctgaagtacatcaactcaaagctgccgggcgccctggaactggaatatgaaggcttctaccgtcgcggctttttcgttacgaagaaaaagtacgcagtcattgacgaagaaggcaaaatcaccacgcgcggtctggaaattgtgcgtcgcgattggagtgaaattgccaaagaaacccaggcaaaggttctggaagcaattctgaaacatggtaacgtcgaagaagcggtcaagatcgtgaaagaagttaccgaaaaactgtcgaattatgaaattccggtcgaaaagctggtgatctacgaacaaattacgcgcccgctgaacgaatataaagccattggcccgcacgtggcagttgctaaacgtctggcggccaagggtatcaagattaaaccgggcatggtgattggttatgttgtcctgcgcggcgatggtccgatcagcaaacgtgcgatcgccatcgaagaattcgatggcaaaaagcataagtacgacgcagaatactacatcgaaaatcaggttctgccggccgtcgaacgtatcctgaaagcattcggttataagcgtgaagatctgcgctggcagaagaccaaacaagtgggcctgggtgcgtggctgaaagttaaaaagtcttaa

SEQ ID NO: 224 - DNA, 2328 bp, Artificial Sequence
  Synthetic
atgattctggacgctgactatattacggaaaatggcaagccggttgtgcgcatcttcaaaaaggaaaatggcgaattcaaggtggaatatgatcgcaactttgaaccgtatatttacgccctgctgaaagatgacagtgcaatcgaagaaattaaaaagatcaccgccgaacgccatggcaccgtggttcgtatcacgaaagcagaaaaggttgaacgtaaatttctgggtcgcccggtggaagtttggaaactgtatttcacgcatccgcaggatgtgccggccattcgtgacaaaatccgctctcacccggcagtcgtggatatttatgaatacgacatcccgtttgccaaacgttatctgattgataagggcctggttccgatggaaggtgacgaagaactgaaaatgctggcttttgatatcgaaaccctgtatcacgaaggcgaagaattcgcggaaggtccgattctgatgatctcatacgcagacgaatcggaagctcgcgtgattacctggaaaaaggttgatctgccgtatgttgacgctgtcagcacggaaaaagatatgattaaggcgtttctgcgtgttgtcaaagaaaaggatccggacgttctgatcacctataacggcgataattttgacttcgcttacctgaaaaagcgctgcgaaaaactgggtgtgaagttcattctgggccgtgacggttctgaaccgaaaatccagcgtatgggcgatcgctttgcagtcgacgtgaaaggtcgcattcatttcgatctgtatccggtgattcgtcgcaccatcaacctgccgacctatacgctggaagcggtctacgaagccatttttggccgtccgaaagaaaaggtgtatgccgaagaaatcgcacaagcttgggaaaccaatgaaggcctggaacgtgtcgctcgctatagcatggaagatgcgaaagtgacgtacgaactgggcaaggaatttttcccgatggaagcgcagctgtcacgcctgattggccaaccgctgtgggatgtgtcgcgtagctctaccggtaacctggttgaatggttcctgctgcgtaaagcgtatgaacgcaacgaactggcaccgaataaaccgtccggccgcgaatacgatgaacgtcgcggcggttatgcgggcggttacgttaaagaaccggaaaagggtctgtgggaaaacatcgtctacctggattacaagagtctgtatccgtccattatcattacccataacgttagtccggacacgctgaatcgcgaaggctgcaaagaatacgatgtggcgccgcaggttggtcaccgtttttgtaaagactttccgggcttcattccgtccctgctgggtgatctgctggaagaacgtcagaaaatcaagcgcaaaatgaaggccaccattgatccgatcgaacgtcgcctgctggactatcgtcaacgcgcgatcaaaattctggccaacagctattacggctattacggttatgcgcgtgcccgctggtactgcaaagaatgtgcagaaagcgttacggcttggggccgcgaatacatcgaaatgtctatccgtgaaatcgaagaaaagtacggtttcaaggtgctgtacgctgataccgacggcttccatgcgacgattccgggtgaagatgccgaaaccatcaaaaagaaagcaatggaattcctgaagtacatcaactcaaagctgccgggcgccctggaactggaatatgaaggcttctaccgtcgcggctttttcgttacgaagaaaaagtacgcagtcattgacgaagaaggcaaaatcaccacgcgcggtctggaaattgtgcgtcgcgattggagtgaaattgccaaagaaacccaggcacgtgttctggaagcactgctgaaagatggtaatgtcgaagaagcagtgagtattgttaaagaagtcacggaaaaactgtccaagtatgaagtcccgccggaaaaactggtgattcatgaacaaatcacccgcgaactgaaagattacaaggcgacgggcccgcacgtggcaattgctaaacgtctggcagcgcgtggcgttaagatccgtccgggtaccgttattagctatatcgtcctgaaaggctctggtcgtattggtgaccgcgccatcccgtttgatgaattcgacccggctaaacaccgctacgatgcggaatattacattgaaaatcaggtcctgccggctgtggaacgtatcctgaaagcgtttggctatcgtaaggaagatctgcgctaccagaaaacccgtcaagtgggcctgggtgcgtggctgaaaccgaagggtaaaaagtaa

SEQ ID NO: 225 - DNA, 2328 bp, Artificial Sequence
  Synthetic
atgattctggacgctgactatattacggaaaatggcaagccggttgtgcgcatcttcaaaaaggaaaatggcgaattcaaggtggaatatgatcgcaactttgaaccgtatatttacgccctgctgaaagatgacagtgcaatcgaagaaattaaaaagatcaccgccgaacgccatggcaccgtggttcgtatcacgaaagcagaaaaggttgaacgtaaatttctgggtcgcccggtggaagtttggaaactgtatttcacgcatccgcaggatgtgccggccattcgtgacaaaatccgctctcacccggcagtcgtggatatttatgaatacgacatcccgtttgccaaacgttatctgattgataagggcctggttccgatggaaggtgacgaagaactgaaaatgctggcttttgatatcgaaaccctgtatcacgaaggcgaagaattcgcggaaggtccgattctgatgatctcatacgcagacgaatcggaagctcgcgtgattacctggaaaaaggttgatctgccgtatgttgacgctgtcagcacggaaaaagatatgattaaggcgtttctgcgtgttgtcaaagaaaaggatccggacgttctgatcacctataacggcgataattttgacttcgcttacctgaaaaagcgctgcgaaaaactgggtgtgaagttcattctgggccgtgacggttctgaaccgaaaatccagcgtatgggcgatcgctttgcagtcgacgtgaaaggtcgcattcatttcgatctgtatccggtgattcgtcgcaccatcaacctgccgacctatacgctggaagcggtctacgaagccatttttggccgtccgaaagaaaaggtgtatgccgaagaaatcgcacaagcttgggaaaccaatgaaggcctggaacgtgtcgctcgctatagcatggaagatgcgaaagtgacgtacgaactgggcaaggaatttttcccgatggaagcgcagctgtcacgcctgattggccaaccgctgtgggatgtgtcgcgtagctctaccggtaacctggttgaatggttcctgctgcgtaaagcgtatgaacgcaacgaactggcaccgaataaaccgtccggccgcgaatacgatgaacgtcgcggcggttatgcgggcggttacgttaaagaaccggaaaagggtctgtgggaaaacatcgtctacctggattacaagagtctgtatccgtccattatcattacccataacgttagtccggacacgctgaatcgcgaaggctgcaaagaatacgatgtggcgccgcaggttggtcaccgtttttgtaaagactttccgggcttcattccgtccctgctgggtgatctgctggaagaacgtcagaaaatcaagcgcaaaatgaaggccaccattgatccgatcgaacgtcgcctgctggactatcgtcaacgcgcgatcaaaattctggccaacagctattacggctattacggttatgcgcgtgcccgctggtactgcaaagaatgtgcagaaagcgttacggcttggggccgcgaatacatcgaaatgtctatccgtgaaatcgaagaaaagtacggtttcaaggtgctgtacgctgataccgacggcttccatgcgacgattccgggtgaagatgccgaaaccatcaaaaagaaagcaatggaattcctgaagtacatcaactcaaagctgccgggcgccctggaactggaatatgaaggcttctaccgtcgcggctttttcgttacgaagaaaaagtacgcagtcattgacgaagaaggcaaaatcaccacgcgcggtctggaaattgtgcgtcgcgattggagtgaaattgccaaagaaacccaggcacgcgtcctggaagcaatcctgaaagatggtgacgtggaagaagccgtccgtattgtgaaagaagttacggaaaaactgtccaaatatgaagttccgccggaaaaactggtcatccatgaacaaattacccgcgaactgaaagattacaaagcgacgggcccgcacgtcgcaatcgctaaacgtctggcggcgcgtggcgtgaaaattcgtccgggtaccgtgatctcatatattgttctgaaaggctcgggtcgtatcggtgaccgcgctattccgtttgatgaattcgacccgaaaaaacacaaatacgatgcggaatactacatcgaaaaccaggttctgccggccgtcgaacgtattctgcgcgcatttggctaccgtaaagaagatctgcgttatcaaaaaaccaaacaagtgggtctgggtgcgtggctgaaaccgaaaggtaaaaaataa

SEQ ID NO: 226 - DNA, 2325 bp, Artificial Sequence
  Synthetic
atgattctggacgctgactatattacggaaaatggcaagccggttgtgcgcatcttcaaaaaggaaaatggcgaattcaaggtggaatatgatcgcaactttgaaccgtatatttacgccctgctgaaagatgacagtgcaatcgaagaaattaaaaagatcaccgccgaacgccatggcaccgtggttcgtatcacgaaagcagaaaaggttgaacgtaaatttctgggtcgcccggtggaagtttggaaactgtatttcacgcatccgcaggatgtgccggccattcgtgacaaaatccgctctcacccggcagtcgtggatatttatgaatacgacatcccgtttgccaaacgttatctgattgataagggcctggttccgatggaaggtgacgaagaactgaaaatgctggcttttgatatcgaaaccctgtatcacgaaggcgaagaattcgcggaaggtccgattctgatgatctcatacgcagacgaatcggaagctcgcgtgattacctggaaaaaggttgatctgccgtatgttgacgctgtcagcacggaaaaagatatgattaaggcgtttctgcgtgttgtcaaagaaaaggatccggacgttctgatcacctataacggcgataattttgacttcgcttacctgaaaaagcgctgcgaaaaactgggtgtgaagttcattctgggccgtgacggttctgaaccgaaaatccagcgtatgggcgatcgctttgcagtcgacgtgaaaggtcgcattcatttcgatctgtatccggtgattcgtcgcaccatcaacctgccgacctatacgctggaagcggtctacgaagccatttttggccgtccgaaagaaaaggtgtatgccgaagaaatcgcacaagcttgggaaaccaatgaaggcctggaacgtgtcgctcgctatagcatggaagatgcgaaagtgacgtacgaactgggcaaggaatttttcccgatggaagcgcagctgtcacgcctgattggccaaccgctgtgggatgtgtcgcgtagctctaccggtaacctggttgaatggttcctgctgcgtaaagcgtatgaacgcaacgaactggcaccgaataaaccgtccggccgcgaatacgatgaacgtcgcggcggttatgcgggcggttacgttaaagaaccggaaaagggtctgtgggaaaacatcgtctacctggattacaagagtctgtatccgtccattatcattacccataacgttagtccggacacgctgaatcgcgaaggctgcaaagaatacgatgtggcgccgcaggttggtcaccgtttttgtaaagactttccgggcttcattccgtccctgctgggtgatctgctggaagaacgtcagaaaatcaagcgcaaaatgaaggccaccattgatccgatcgaacgtcgcctgctggactatcgtcaacgcgcgatcaaaattctggccaacagctattacggctattacggttatgcgcgtgcccgctggtactgcaaagaatgtgcagaaagcgttacggcttggggccgcgaatacatcgaaatgtctatccgtgaaatcgaagaaaagtacggtttcaaggtgctgtacgctgataccgacggcttccatgcgacgattccgggtgaagatgccgaaaccatcaaaaagaaagcaatggaattcctgaagtacatcaactcaaagctgccgggcgccctggaactggaatatgaaggcttctaccgtcgcggctttttcgttacgaagaaaaagtacgcagtcattgacgaagaaggcaaaatcaccacgcgcggtctggaaattgtgcgtcgcgattggagtgaaattgccaaagaaacccaggcacgtgttctggaagcaattctgaaacatggtaacgtcgaagaagcggtcaaaatcgtgaaagaagttacggaaaaactgtctaactacgaaattccgccggaaaaactggccatctacgaacaaattacccgcccgctgcatgaatataaagcaatcggtccgcacgtcgcagtggcaaaacgtctggcagcacgcggcgttaaagtcaaaccgggtatggtcatcggctatattgtgctgcgtggtgatggcccgatcagcaaccgcgcaattctggctgaagaatacgatctgaaaaaacacaaatacgacgccgaatattacatcgaaaatcaggttctgccggctgtcctgcgtattctggaagcgtttggctatcgtaaagaagatctgcgctggcagaaaacccgtcaaacgggtctgacctcatggctgaatattaaaaaatcgtaa

SEQ ID NO: 227 - DNA, 2325 bp, Artificial Sequence
  Synthetic
atgattctggacgctgactatattacggaaaatggcaagccggttgtgcgcatcttcaaaaaggaaaatggcgaattcaaggtggaatatgatcgcaactttgaaccgtatatttacgccctgctgaaagatgacagtgcaatcgaagaaattaaaaagatcaccgccgaacgccatggcaccgtggttcgtatcacgaaagcagaaaaggttgaacgtaaatttctgggtcgcccggtggaagtttggaaactgtatttcacgcatccgcaggatgtgccggccattcgtgacaaaatccgctctcacccggcagtcgtggatatttatgaatacgacatcccgtttgccaaacgttatctgattgataagggcctggttccgatggaaggtgacgaagaactgaaaatgctggcttttgatatcgaaaccctgtatcacgaaggcgaagaattcgcggaaggtccgattctgatgatctcatacgcagacgaatcggaagctcgcgtgattacctggaaaaaggttgatctgccgtatgttgacgctgtcagcacggaaaaagatatgattaaggcgtttctgcgtgttgtcaaagaaaaggatccggacgttctgatcacctataacggcgataattttgacttcgcttacctgaaaaagcgctgcgaaaaactgggtgtgaagttcattctgggccgtgacggttctgaaccgaaaatccagcgtatgggcgatcgctttgcagtcgacgtgaaaggtcgcattcatttcgatctgtatccggtgattcgtcgcaccatcaacctgccgacctatacgctggaagcggtctacgaagccatttttggccgtccgaaagaaaaggtgtatgccgaagaaatcgcacaagcttgggaaaccaatgaaggcctggaacgtgtcgctcgctatagcatggaagatgcgaaagtgacgtacgaactgggcaaggaatttttcccgatggaagcgcagctgtcacgcctgattggccaaccgctgtgggatgtgtcgcgtagctctaccggtaacctggttgaatggttcctgctgcgtaaagcgtatgaacgcaacgaactggcaccgaataaaccgtccggccgcgaatacgatgaacgtcgcggcggttatgcgggcggttacgttaaagaaccggaaaagggtctgtgggaaaacatcgtctacctggattacaagagtctgtatccgtccattatcattacccataacgttagtccggacacgctgaatcgcgaaggctgcaaagaatacgatgtggcgccgcaggttggtcaccgtttttgtaaagactttccgggcttcattccgtccctgctgggtgatctgctggaagaacgtcagaaaatcaagcgcaaaatgaaggccaccattgatccgatcgaacgtcgcctgctggactatcgtcaacgcgcgatcaaaattctggccaacagctattacggctattacggttatgcgcgtgcccgctggtactgcaaagaatgtgcagaaagcgttacggcttggggccgcgaatacatcgaaatgtctatccgtgaaatcgaagaaaagtacggtttcaaggtgctgtacgctgataccgacggcttccatgcgacgattccgggtgaagatgccgaaaccatcaaaaagaaagcaatggaattcctgaagtacatcaactcaaagctgccgggcgccctggaactggaatatgaaggcttctaccgtcgcggctttttcgttacgaagaaaaagtacgcagtcattgacgaagaaggcaaaatcaccacgcgcggtctggaaattgtgcgtcgcgattggagtgaaattgccaaagaaacccaggcaaaagttctggaagcaatcctgaaacatggtaatgtcgaagaagcagtgaaaattgtcaaggaagtgacggaaaaactgtcgaagtatgaaatcccgccggaaaaactggtgatctacgaacaaattacccgcccgctgcatgaatataaagcgattggcccgcacgtggcagttgctaaacgtctggcagcccgcggtgtcaaagtgcgtccgggcatggtgatcggttatattgttctgcgtggcgatggtccgatcagtaaacgcgcgattctggccgaagaatttgatccgcgcaaacacaagtacgacgccgaatattacatcgaaaaccaggtgctgccggctgttctgcgtattctggaagcgttcggctatcgtaaagaagatctgcgctggcagaaaaccaagcaaacgggtctgaccgcatggctgaatgtgaaaaagaaataa

SEQ ID NO: 228 - DNA, 2331 bp, Artificial Sequence
  Synthetic
atgattctggacgctgactatattacggaaaatggcaagccggttgtgcgcatcttcaaaaaggaaaatggcgaattcaaggtggaatatgatcgcaactttgaaccgtatatttacgccctgctgaaagatgacagtgcaatcgaagaaattaaaaagatcaccgccgaacgccatggcaccgtggttcgtatcacgaaagcagaaaaggttgaacgtaaatttctgggtcgcccggtggaagtttggaaactgtatttcacgcatccgcaggatgtgccggccattcgtgacaaaatccgctctcacccggcagtcgtggatatttatgaatacgacatcccgtttgccaaacgttatctgattgataagggcctggttccgatggaaggtgacgaagaactgaaaatgctggcttttgatatcgaaaccctgtatcacgaaggcgaagaattcgcggaaggtccgattctgatgatctcatacgcagacgaatcggaagctcgcgtgattacctggaaaaaggttgatctgccgtatgttgacgctgtcagcacggaaaaagatatgattaaggcgtttctgcgtgttgtcaaagaaaaggatccggacgttctgatcacctataacggcgataattttgacttcgcttacctgaaaaagcgctgcgaaaaactgggtgtgaagttcattctgggccgtgacggttctgaaccgaaaatccagcgtatgggcgatcgctttgcagtcgacgtgaaaggtcgcattcatttcgatctgtatccggtgattcgtcgcaccatcaacctgccgacctatacgctggaagcggtctacgaagccatttttggccgtccgaaagaaaaggtgtatgccgaagaaatcgcacaagcttgggaaaccaatgaaggcctggaacgtgtcgctcgctatagcatggaagatgcgaaagtgacgtacgaactgggcaaggaatttttcccgatggaagcgcagctgtcacgcctgattggccaaccgctgtgggatgtgtcgcgtagctctaccggtaacctggttgaatggttcctgctgcgtaaagcgtatgaacgcaacgaactggcgccgaataaaccggatgaacgcgaatatgaacgtcgcctgcgtgaaagttatgaaggcggttacgttaaagaaccggaacgcggcctgtgggaaggtattgtgtcactggattttcgtagtctgtacccgtccattatcattacccataacgtttcgccggatacgctgaataaagaaggctgcggtgaatatgacgaagccccggaagtgggtcaccgcttctgtaaagattttccgggcttcattccgtcactgctgggttcgctgctggaagaacgccagaagatcaagaaacgtatgaaggaatctaaggatccggtggaacgcaaactgctggactatcgtcaacgcgcgatcaagattctggccaacagcttttatggctattacggttacgcgaaagcccgttggtactgcaaggaatgtgcagaaagcgtgaccgcttggggccgccagtatattgaactggtccgtcgcgaactggaagaacgtggttttaaagtgctgtatatcgataccgacggcctgtacgccacgattccgggtgaaaagaactgggaagaaatcaagcgtcgcgcactggaatttgttaactacatcaattccaaactgccgggcattctggaactggaatatgaaggcttctacacccgtggctttttcgtgacgaagaaaaagtatgcgctgatcgatgaagaaggcaaaattgtcacccgtggtctggaaatcgtgcgtcgcgattggagtgaaattgccaaagaaacccaggcacgcgttctggaagcaatcctgcgtcatggtgacgtcgaagaagccgttcgcattgtcaaagatgtgacggaaaagctgtcgaaatatgaagtcccgccggaaaaactggtgatccatgaacaaattacccgtgaactgaaggattacaaagcgacgggcccgcacgttgcaattgctaaacgcctggcagcccgtggcatcaagattcgtccgggtaccgttatcagctatattgtcctgaaaggctctggtcgcatcggtgatcgtgctattccgtttgatgaattcgacccgacgaaacaccgttacgatgccgaatattacatcgaaaatcaggtgctgccggccgttgaacgcattctgaaagcatttggctataagaaagaagaactgcgctaccagaaaacccgtcaagtgggcctgggtgcgtggctgaagctgaaaggtaagaaataa

SEQ ID NO: 229 - DNA, 2325 bp, Artificial Sequence
  Synthetic
atgattctggacgctgactatattacggaaaatggcaagccggttgtgcgcatcttcaaaaaggaaaatggcgaattcaaggtggaatatgatcgcaactttgaaccgtatatttacgccctgctgaaagatgacagtgcaatcgaagaaattaaaaagatcaccgccgaacgccatggcaccgtggttcgtatcacgaaagcagaaaaggttgaacgtaaatttctgggtcgcccggtggaagtttggaaactgtatttcacgcatccgcaggatgtgccggccattcgtgacaaaatccgctctcacccggcagtcgtggatatttatgaatacgacatcccgtttgccaaacgttatctgattgataagggcctggttccgatggaaggtgacgaagaactgaaaatgctggcttttgatatcgaaaccctgtatcacgaaggcgaagaattcgcggaaggtccgattctgatgatctcatacgcagacgaatcggaagctcgcgtgattacctggaaaaaggttgatctgccgtatgttgacgctgtcagcacggaaaaagatatgattaaggcgtttctgcgtgttgtcaaagaaaaggatccggacgttctgatcacctataacggcgataattttgacttcgcttacctgaaaaagcgctgcgaaaaactgggtgtgaagttcattctgggccgtgacggttctgaaccgaaaatccagcgtatgggcgatcgctttgcagtcgacgtgaaaggtcgcattcatttcgatctgtatccggtgattcgtcgcaccatcaacctgccgacctatacgctggaagcggtctacgaagccatttttggccgtccgaaagaaaaggtgtatgccgaagaaatcgcacaagcttgggaaaccaatgaaggcctggaacgtgtcgctcgctatagcatggaagatgcgaaagtgacgtacgaactgggcaaggaatttttcccgatggaagcgcagctgtcacgcctgattggccaaccgctgtgggatgtgtcgcgtagctctaccggtaacctggttgaatggttcctgctgcgtaaagcgtatgaacgcaacgaactggcgccgaataaaccggatgaacgcgaatatgaacgtcgcctgcgtgaaagttatgaaggcggttacgttaaagaaccggaacgcggcctgtgggaaggtattgtgtcactggattttcgtagtctgtacccgtccattatcattacccataacgtttcgccggatacgctgaataaagaaggctgcggtgaatatgacgaagccccggaagtgggtcaccgcttctgtaaagattttccgggcttcattccgtcactgctgggttcgctgctggaagaacgccagaagatcaagaaacgtatgaaggaatctaaggatccggtggaacgcaaactgctggactatcgtcaacgcgcgatcaagattctggccaacagcttttatggctattacggttacgcgaaagcccgttggtactgcaaggaatgtgcagaaagcgtgaccgcttggggccgccagtatattgaactggtccgtcgcgaactggaagaacgtggttttaaagtgctgtatatcgataccgacggcctgtacgccacgattccgggtgaaaagaactgggaagaaatcaagcgtcgcgcactggaatttgttaactacatcaattccaaactgccgggcattctggaactggaatatgaaggcttctacacccgtggctttttcgtgacgaagaaaaagtatgcgctgatcgatgaagaaggcaaaattgtcacccgtggtctggaaatcgtgcgtcgcgattggagtgaaattgccaaagaaacccaggcacgtgtcctggaagcaatcctgaaacatggtgatgtggaagaagcggttcgcattgtcaaagaagtgacggaaaagctgtcgaaatatgaagttccgccggaaaaactggtcatccatgaacaaattacccgcgatctgcgtgactacaaagccacgggtccgcacgtggcagttgcaaaacgtctggcagcccgtggcgtgaagattcgtccgggtaccgtgatcagttatattgttctgaaaggctccggtcgcatcggtgaccgtgctattccgtttgatgaattcgacccgacgaaacaccgttacgatgccgaatattacatcgaaaatcaggtcctgccggccgtggaacgcattctgaaagcatttggttatcgcaaggaagatctgcgttaccagaagaccaaacaagtcggcctgggtgcgtggctgaaagtgaaaaagtaa

SEQ ID NO: 230 - DNA, 2331 bp, Artificial Sequence
  Synthetic
atgattctggacgctgactatattacggaaaatggcaagccggttgtgcgcatcttcaaaaaggaaaatggcgaattcaaggtggaatatgatcgcaactttgaaccgtatatttacgccctgctgaaagatgacagtgcaatcgaagaaattaaaaagatcaccgccgaacgccatggcaccgtggttcgtatcacgaaagcagaaaaggttgaacgtaaatttctgggtcgcccggtggaagtttggaaactgtatttcacgcatccgcaggatgtgccggccattcgtgacaaaatccgctctcacccggcagtcgtggatatttatgaatacgacatcccgtttgccaaacgttatctgattgataagggcctggttccgatggaaggtgacgaagaactgaaaatgctggcttttgatatcgaaaccctgtatcacgaaggcgaagaattcgcggaaggtccgattctgatgatctcatacgcagacgaatcggaagctcgcgtgattacctggaaaaaggttgatctgccgtatgttgacgctgtcagcacggaaaaagatatgattaaggcgtttctgcgtgttgtcaaagaaaaggatccggacgttctgatcacctataacggcgataattttgacttcgcttacctgaaaaagcgctgcgaaaaactgggtgtgaagttcattctgggccgtgacggttctgaaccgaaaatccagcgtatgggcgatcgctttgcagtcgacgtgaaaggtcgcattcatttcgatctgtatccggtgattcgtcgcaccatcaacctgccgacctatacgctggaagcggtctacgaagccatttttggccgtccgaaagaaaaggtgtatgccgaagaaatcgcacaagcttgggaaaccaatgaaggcctggaacgtgtcgctcgctatagcatggaagatgcgaaagtgacgtacgaactgggcaaggaatttttcccgatggaagcgcagctgtcacgcctgattggccaaccgctgtgggatgtgtcgcgtagctctaccggtaacctggttgaatggttcctgctgcgtaaagcgtatgaacgcaacgaactggcgccgaataaaccggatgaacgcgaatatgaacgtcgcctgcgtgaaagttatgaaggcggttacgttaaagaaccggaacgcggcctgtgggaaggtattgtgtcactggattttcgtagtctgtacccgtccattatcattacccataacgtttcgccggatacgctgaataaagaaggctgcggtgaatatgacgaagccccggaagtgggtcaccgcttctgtaaagattttccgggcttcattccgtcactgctgggttcgctgctggaagaacgccagaagatcaagaaacgtatgaaggaatctaaggatccggtggaacgcaaactgctggactatcgtcaacgcgcgatcaagattctggccaacagcttttatggctattacggttacgcgaaagcccgttggtactgcaaggaatgtgcagaaagcgtgaccgcttggggccgccagtatattgaactggtccgtcgcgaactggaagaacgtggttttaaagtgctgtatatcgataccgacggcctgtacgccacgattccgggtgaaaagaactgggaagaaatcaagcgtcgcgcactggaatttgttaactacatcaattccaaactgccgggcattctggaactggaatatgaaggcttctacacccgtggctttttcgtgacgaagaaaaagtatgcgctgatcgatgaagaaggcaaaattgtcacccgtggtctggaaatcgtgcgtcgcgattggagtgaaattgccaaagaaacccaggcacgtgtgctggaagctctgctgaaagatggcaatgttgaagaagcggtttccattgtcaaagaagtgacggaaaagctgggtaaatatgaagtcccgccggaaaaactggtgatccatgaacaaattacccgcgaactgaaggattacaaagcgacgggcccgcacgttgctatcgcgaaacgtctggcagcgcgtggcgtgaagattcgtccgggtaccgttatcagctatattgtcctgaaaggctctggtcgtatcggtgaccgcgcgattccgtttgatgaattcgacccgacgaaacatcgctacgatgcagaatattacatcgaaaaccaggttctgccggctgtcgaacgtattctgaaagcgtttggctatcgtgccgaagatctgcgctaccagaaaacccgtcaagtgggcctgggtgtttggctgcaaccgaaaggtaagaaataa

SEQ ID NO: 231 - DNA, 2328 bp, Artificial Sequence
  Synthetic
atgattctggacgctgactatattacggaaaatggcaagccggttgtgcgcatcttcaaaaaggaaaatggcgaattcaaggtggaatatgatcgcaactttgaaccgtatatttacgccctgctgaaagatgacagtgcaatcgaagaaattaaaaagatcaccgccgaacgccatggcaccgtggttcgtatcacgaaagcagaaaaggttgaacgtaaatttctgggtcgcccggtggaagtttggaaactgtatttcacgcatccgcaggatgtgccggccattcgtgacaaaatccgctctcacccggcagtcgtggatatttatgaatacgacatcccgtttgccaaacgttatctgattgataagggcctggttccgatggaaggtgacgaagaactgaaaatgctggcttttgatatcgaaaccctgtatcacgaaggcgaagaattcgcggaaggtccgattctgatgatctcatacgcagacgaatcggaagctcgcgtgattacctggaaaaaggttgatctgccgtatgttgacgctgtcagcacggaaaaagatatgattaaggcgtttctgcgtgttgtcaaagaaaaggatccggacgttctgatcacctataacggcgataattttgacttcgcttacctgaaaaagcgctgcgaaaaactgggtgtgaagttcattctgggccgtgacggttctgaaccgaaaatccagcgtatgggcgatcgctttgcagtcgacgtgaaaggtcgcattcatttcgatctgtatccggtgattcgtcgcaccatcaacctgccgacctatacgctggaagcggtctacgaagccatttttggccgtccgaaagaaaaggtgtatgccgaagaaatcgcacaagcttgggaaaccaatgaaggcctggaacgtgtcgctcgctatagcatggaagatgcgaaagtgacgtacgaactgggcaaggaatttttcccgatggaagcgcagctgtcacgcctgattggccaaccgctgtgggatgtgtcgcgtagctctaccggtaacctggttgaatggttcctgctgcgtaaagcgtatgaacgcaacgaactggcgccgaataaaccggatgaacgcgaatatgaacgtcgcctgcgtgaaagttatgaaggcggttacgttaaagaaccggaacgcggcctgtgggaaggtattgtgtcactggattttcgtagtctgtacccgtccattatcattacccataacgtttcgccggatacgctgaataaagaaggctgcggtgaatatgacgaagccccggaagtgggtcaccgcttctgtaaagattttccgggcttcattccgtcactgctgggttcgctgctggaagaacgccagaagatcaagaaacgtatgaaggaatctaaggatccggtggaacgcaaactgctggactatcgtcaacgcgcgatcaagattctggccaacagcttttatggctattacggttacgcgaaagcccgttggtactgcaaggaatgtgcagaaagcgtgaccgcttggggccgccagtatattgaactggtccgtcgcgaactggaagaacgtggttttaaagtgctgtatatcgataccgacggcctgtacgccacgattccgggtgaaaagaactgggaagaaatcaagcgtcgcgcactggaatttgttaactacatcaattccaaactgccgggcattctggaactggaatatgaaggcttctacacccgtggctttttcgtgacgaagaaaaagtatgcgctgatcgatgaagaaggcaaaattgtcacccgtggtctggaaatcgtgcgtcgcgattggagtgaaattgccaaagaaacccaggcaaaggttctggaagcaattctgaaacatggtaacgtcgaagaagcggtcaagatcgtgaaagaagttaccgaaaaactgtcgaattatgaaattccggtcgaaaagctggtgatctacgaacaaattacgcgcccgctgaacgaatataaagccattggcccgcacgtggcagttgctaaacgtctggcggccaagggtatcaagattaaaccgggcatggtgattggttatgttgtcctgcgcggcgatggtccgatcagcaaacgtgcgatcgccatcgaagaattcgatggcaaaaagcataagtacgacgcagaatactacatcgaaaatcaggttctgccggccgtcgaacgtatcctgaaagcattcggttataagcgtgaagatctgcgctggcagaagaccaaacaagtgggcctgggtgcgtggctgaaagttaaaaagtcttaa

SEQ ID NO: 232 - DNA, 2331 bp, Artificial Sequence
  Synthetic
atgattctggacgctgactatattacggaaaatggcaagccggttgtgcgcatcttcaaaaaggaaaatggcgaattcaaggtggaatatgatcgcaactttgaaccgtatatttacgccctgctgaaagatgacagtgcaatcgaagaaattaaaaagatcaccgccgaacgccatggcaccgtggttcgtatcacgaaagcagaaaaggttgaacgtaaatttctgggtcgcccggtggaagtttggaaactgtatttcacgcatccgcaggatgtgccggccattcgtgacaaaatccgctctcacccggcagtcgtggatatttatgaatacgacatcccgtttgccaaacgttatctgattgataagggcctggttccgatggaaggtgacgaagaactgaaaatgctggcttttgatatcgaaaccctgtatcacgaaggcgaagaattcgcggaaggtccgattctgatgatctcatacgcagacgaatcggaagctcgcgtgattacctggaaaaaggttgatctgccgtatgttgacgctgtcagcacggaaaaagatatgattaaggcgtttctgcgtgttgtcaaagaaaaggatccggacgttctgatcacctataacggcgataattttgacttcgcttacctgaaaaagcgctgcgaaaaactgggtgtgaagttcattctgggccgtgacggttctgaaccgaaaatccagcgtatgggcgatcgctttgcagtcgacgtgaaaggtcgcattcatttcgatctgtatccggtgattcgtcgcaccatcaacctgccgacctatacgctggaagcggtctacgaagccatttttggccgtccgaaagaaaaggtgtatgccgaagaaatcgcacaagcttgggaaaccaatgaaggcctggaacgtgtcgctcgctatagcatggaagatgcgaaagtgacgtacgaactgggcaaggaatttttcccgatggaagcgcagctgtcacgcctgattggccaaccgctgtgggatgtgtcgcgtagctctaccggtaacctggttgaatggttcctgctgcgtaaagcgtatgaacgcaacgaactggcgccgaataaaccggatgaacgcgaatatgaacgtcgcctgcgtgaaagttatgaaggcggttacgttaaagaaccggaacgcggcctgtgggaaggtattgtgtcactggattttcgtagtctgtacccgtccattatcattacccataacgtttcgccggatacgctgaataaagaaggctgcggtgaatatgacgaagccccggaagtgggtcaccgcttctgtaaagattttccgggcttcattccgtcactgctgggttcgctgctggaagaacgccagaagatcaagaaacgtatgaaggaatctaaggatccggtggaacgcaaactgctggactatcgtcaacgcgcgatcaagattctggccaacagcttttatggctattacggttacgcgaaagcccgttggtactgcaaggaatgtgcagaaagcgtgaccgcttggggccgccagtatattgaactggtccgtcgcgaactggaagaacgtggttttaaagtgctgtatatcgataccgacggcctgtacgccacgattccgggtgaaaagaactgggaagaaatcaagcgtcgcgcactggaatttgttaactacatcaattccaaactgccgggcattctggaactggaatatgaaggcttctacacccgtggctttttcgtgacgaagaaaaagtatgcgctgatcgatgaagaaggcaaaattgtcacccgtggtctggaaatcgtgcgtcgcgattggagtgaaattgccaaagaaacccaggcacgtgttctggaagcactgctgaaagatggtaatgtcgaagaagcagtgagtattgttaaagaagtcacggaaaaactgtccaagtatgaagtcccgccggaaaaactggtgattcatgaacaaatcacccgcgaactgaaagattacaaggcgacgggcccgcacgtggcaattgctaaacgtctggcagcgcgtggcgttaagatccgtccgggtaccgttattagctatatcgtcctgaaaggctctggtcgtattggtgaccgcgccatcccgtttgatgaattcgacccggctaaacaccgctacgatgcggaatattacattgaaaatcaggtcctgccggctgtggaacgtatcctgaaagcgtttggctatcgtaaggaagatctgcgctaccagaaaacccgtcaagtgggcctgggtgcgtggctgaaaccgaagggtaaaaagtaa

SEQ ID NO: 233 - DNA, 2331 bp, Artificial Sequence
  Synthetic
atgattctggacgctgactatattacggaaaatggcaagccggttgtgcgcatcttcaaaaaggaaaatggcgaattcaaggtggaatatgatcgcaactttgaaccgtatatttacgccctgctgaaagatgacagtgcaatcgaagaaattaaaaagatcaccgccgaacgccatggcaccgtggttcgtatcacgaaagcagaaaaggttgaacgtaaatttctgggtcgcccggtggaagtttggaaactgtatttcacgcatccgcaggatgtgccggccattcgtgacaaaatccgctctcacccggcagtcgtggatatttatgaatacgacatcccgtttgccaaacgttatctgattgataagggcctggttccgatggaaggtgacgaagaactgaaaatgctggcttttgatatcgaaaccctgtatcacgaaggcgaagaattcgcggaaggtccgattctgatgatctcatacgcagacgaatcggaagctcgcgtgattacctggaaaaaggttgatctgccgtatgttgacgctgtcagcacggaaaaagatatgattaaggcgtttctgcgtgttgtcaaagaaaaggatccggacgttctgatcacctataacggcgataattttgacttcgcttacctgaaaaagcgctgcgaaaaactgggtgtgaagttcattctgggccgtgacggttctgaaccgaaaatccagcgtatgggcgatcgctttgcagtcgacgtgaaaggtcgcattcatttcgatctgtatccggtgattcgtcgcaccatcaacctgccgacctatacgctggaagcggtctacgaagccatttttggccgtccgaaagaaaaggtgtatgccgaagaaatcgcacaagcttgggaaaccaatgaaggcctggaacgtgtcgctcgctatagcatggaagatgcgaaagtgacgtacgaactgggcaaggaatttttcccgatggaagcgcagctgtcacgcctgattggccaaccgctgtgggatgtgtcgcgtagctctaccggtaacctggttgaatggttcctgctgcgtaaagcgtatgaacgcaacgaactggcgccgaataaaccggatgaacgcgaatatgaacgtcgcctgcgtgaaagttatgaaggcggttacgttaaagaaccggaacgcggcctgtgggaaggtattgtgtcactggattttcgtagtctgtacccgtccattatcattacccataacgtttcgccggatacgctgaataaagaaggctgcggtgaatatgacgaagccccggaagtgggtcaccgcttctgtaaagattttccgggcttcattccgtcactgctgggttcgctgctggaagaacgccagaagatcaagaaacgtatgaaggaatctaaggatccggtggaacgcaaactgctggactatcgtcaacgcgcgatcaagattctggccaacagcttttatggctattacggttacgcgaaagcccgttggtactgcaaggaatgtgcagaaagcgtgaccgcttggggccgccagtatattgaactggtccgtcgcgaactggaagaacgtggttttaaagtgctgtatatcgataccgacggcctgtacgccacgattccgggtgaaaagaactgggaagaaatcaagcgtcgcgcactggaatttgttaactacatcaattccaaactgccgggcattctggaactggaatatgaaggcttctacacccgtggctttttcgtgacgaagaaaaagtatgcgctgatcgatgaagaaggcaaaattgtcacccgtggtctggaaatcgtgcgtcgcgattggagtgaaattgccaaagaaacccaggcacgcgtcctggaagcaatcctgaaagatggtgacgtggaagaagccgtccgtattgtgaaagaagttacggaaaaactgtccaaatatgaagttccgccggaaaaactggtcatccatgaacaaattacccgcgaactgaaagattacaaagcgacgggcccgcacgtcgcaatcgctaaacgtctggcggcgcgtggcgtgaaaattcgtccgggtaccgtgatctcatatattgttctgaaaggctcgggtcgtatcggtgaccgcgctattccgtttgatgaattcgacccgaaaaaacacaaatacgatgcggaatactacatcgaaaaccaggttctgccggccgtcgaacgtattctgcgcgcatttggctaccgtaaagaagatctgcgttatcaaaaaaccaaacaagtgggtctgggtgcgtggctgaaaccgaaaggtaaaaaataa

SEQ ID NO: 234 - DNA, 2328 bp, Artificial Sequence
  Synthetic
atgattctggacgctgactatattacggaaaatggcaagccggttgtgcgcatcttcaaaaaggaaaatggcgaattcaaggtggaatatgatcgcaactttgaaccgtatatttacgccctgctgaaagatgacagtgcaatcgaagaaattaaaaagatcaccgccgaacgccatggcaccgtggttcgtatcacgaaagcagaaaaggttgaacgtaaatttctgggtcgcccggtggaagtttggaaactgtatttcacgcatccgcaggatgtgccggccattcgtgacaaaatccgctctcacccggcagtcgtggatatttatgaatacgacatcccgtttgccaaacgttatctgattgataagggcctggttccgatggaaggtgacgaagaactgaaaatgctggcttttgatatcgaaaccctgtatcacgaaggcgaagaattcgcggaaggtccgattctgatgatctcatacgcagacgaatcggaagctcgcgtgattacctggaaaaaggttgatctgccgtatgttgacgctgtcagcacggaaaaagatatgattaaggcgtttctgcgtgttgtcaaagaaaaggatccggacgttctgatcacctataacggcgataattttgacttcgcttacctgaaaaagcgctgcgaaaaactgggtgtgaagttcattctgggccgtgacggttctgaaccgaaaatccagcgtatgggcgatcgctttgcagtcgacgtgaaaggtcgcattcatttcgatctgtatccggtgattcgtcgcaccatcaacctgccgacctatacgctggaagcggtctacgaagccatttttggccgtccgaaagaaaaggtgtatgccgaagaaatcgcacaagcttgggaaaccaatgaaggcctggaacgtgtcgctcgctatagcatggaagatgcgaaagtgacgtacgaactgggcaaggaatttttcccgatggaagcgcagctgtcacgcctgattggccaaccgctgtgggatgtgtcgcgtagctctaccggtaacctggttgaatggttcctgctgcgtaaagcgtatgaacgcaacgaactggcgccgaataaaccggatgaacgcgaatatgaacgtcgcctgcgtgaaagttatgaaggcggttacgttaaagaaccggaacgcggcctgtgggaaggtattgtgtcactggattttcgtagtctgtacccgtccattatcattacccataacgtttcgccggatacgctgaataaagaaggctgcggtgaatatgacgaagccccggaagtgggtcaccgcttctgtaaagattttccgggcttcattccgtcactgctgggttcgctgctggaagaacgccagaagatcaagaaacgtatgaaggaatctaaggatccggtggaacgcaaactgctggactatcgtcaacgcgcgatcaagattctggccaacagcttttatggctattacggttacgcgaaagcccgttggtactgcaaggaatgtgcagaaagcgtgaccgcttggggccgccagtatattgaactggtccgtcgcgaactggaagaacgtggttttaaagtgctgtatatcgataccgacggcctgtacgccacgattccgggtgaaaagaactgggaagaaatcaagcgtcgcgcactggaatttgttaactacatcaattccaaactgccgggcattctggaactggaatatgaaggcttctacacccgtggctttttcgtgacgaagaaaaagtatgcgctgatcgatgaagaaggcaaaattgtcacccgtggtctggaaatcgtgcgtcgcgattggagtgaaattgccaaagaaacccaggcacgtgttctggaagcaattctgaaacatggtaacgtcgaagaagcggtcaaaatcgtgaaagaagttacggaaaaactgtctaactacgaaattccgccggaaaaactggccatctacgaacaaattacccgcccgctgcatgaatataaagcaatcggtccgcacgtcgcagtggcaaaacgtctggcagcacgcggcgttaaagtcaaaccgggtatggtcatcggctatattgtgctgcgtggtgatggcccgatcagcaaccgcgcaattctggctgaagaatacgatctgaaaaaacacaaatacgacgccgaatattacatcgaaaatcaggttctgccggctgtcctgcgtattctggaagcgtttggctatcgtaaagaagatctgcgctggcagaaaacccgtcaaacgggtctgacctcatggctgaatattaaaaaatcgtaa

SEQ ID NO: 235 - DNA, 2328 bp, Artificial Sequence
  Synthetic
atgattctggacgctgactatattacggaaaatggcaagccggttgtgcgcatcttcaaaaaggaaaatggcgaattcaaggtggaatatgatcgcaactttgaaccgtatatttacgccctgctgaaagatgacagtgcaatcgaagaaattaaaaagatcaccgccgaacgccatggcaccgtggttcgtatcacgaaagcagaaaaggttgaacgtaaatttctgggtcgcccggtggaagtttggaaactgtatttcacgcatccgcaggatgtgccggccattcgtgacaaaatccgctctcacccggcagtcgtggatatttatgaatacgacatcccgtttgccaaacgttatctgattgataagggcctggttccgatggaaggtgacgaagaactgaaaatgctggcttttgatatcgaaaccctgtatcacgaaggcgaagaattcgcggaaggtccgattctgatgatctcatacgcagacgaatcggaagctcgcgtgattacctggaaaaaggttgatctgccgtatgttgacgctgtcagcacggaaaaagatatgattaaggcgtttctgcgtgttgtcaaagaaaaggatccggacgttctgatcacctataacggcgataattttgacttcgcttacctgaaaaagcgctgcgaaaaactgggtgtgaagttcattctgggccgtgacggttctgaaccgaaaatccagcgtatgggcgatcgctttgcagtcgacgtgaaaggtcgcattcatttcgatctgtatccggtgattcgtcgcaccatcaacctgccgacctatacgctggaagcggtctacgaagccatttttggccgtccgaaagaaaaggtgtatgccgaagaaatcgcacaagcttgggaaaccaatgaaggcctggaacgtgtcgctcgctatagcatggaagatgcgaaagtgacgtacgaactgggcaaggaatttttcccgatggaagcgcagctgtcacgcctgattggccaaccgctgtgggatgtgtcgcgtagctctaccggtaacctggttgaatggttcctgctgcgtaaagcgtatgaacgcaacgaactggcgccgaataaaccggatgaacgcgaatatgaacgtcgcctgcgtgaaagttatgaaggcggttacgttaaagaaccggaacgcggcctgtgggaaggtattgtgtcactggattttcgtagtctgtacccgtccattatcattacccataacgtttcgccggatacgctgaataaagaaggctgcggtgaatatgacgaagccccggaagtgggtcaccgcttctgtaaagattttccgggcttcattccgtcactgctgggttcgctgctggaagaacgccagaagatcaagaaacgtatgaaggaatctaaggatccggtggaacgcaaactgctggactatcgtcaacgcgcgatcaagattctggccaacagcttttatggctattacggttacgcgaaagcccgttggtactgcaaggaatgtgcagaaagcgtgaccgcttggggccgccagtatattgaactggtccgtcgcgaactggaagaacgtggttttaaagtgctgtatatcgataccgacggcctgtacgccacgattccgggtgaaaagaactgggaagaaatcaagcgtcgcgcactggaatttgttaactacatcaattccaaactgccgggcattctggaactggaatatgaaggcttctacacccgtggctttttcgtgacgaagaaaaagtatgcgctgatcgatgaagaaggcaaaattgtcacccgtggtctggaaatcgtgcgtcgcgattggagtgaaattgccaaagaaacccaggcaaaagttctggaagcaatcctgaaacatggtaatgtcgaagaagcagtgaaaattgtcaaggaagtgacggaaaaactgtcgaagtatgaaatcccgccggaaaaactggtgatctacgaacaaattacccgcccgctgcatgaatataaagcgattggcccgcacgtggcagttgctaaacgtctggcagcccgcggtgtcaaagtgcgtccgggcatggtgatcggttatattgttctgcgtggcgatggtccgatcagtaaacgcgcgattctggccgaagaatttgatccgcgcaaacacaagtacgacgccgaatattacatcgaaaaccaggtgctgccggctgttctgcgtattctggaagcgttcggctatcgtaaagaagatctgcgctggcagaaaaccaagcaaacgggtctgaccgcatggctgaatgtgaaaaagaaataa

SEQ ID NO: 236 - DNA, 2328 bp, Artificial Sequence
  Synthetic
atgattctggacgctgactatattacggaaaatggcaagccggttgtgcgcatcttcaaaaaggaaaatggcgaattcaaggtggaatatgatcgcaactttgaaccgtatatttacgccctgctgaaagatgacagtgcaatcgaagaaattaaaaagatcaccgccgaacgccatggcaccgtggttcgtatcacgaaagcagaaaaggttgaacgtaaatttctgggtcgcccggtggaagtttggaaactgtatttcacgcatccgcaggatgtgccggccattcgtgacaaaatccgctctcacccggcagtcgtggatatttatgaatacgacatcccgtttgccaaacgttatctgattgataagggcctggttccgatggaaggtgacgaagaactgaaaatgctggcttttgatatcgaaaccctgtatcacgaaggcgaagaattcgcggaaggtccgattctgatgatctcatacgcagacgaatcggaagctcgcgtgattacctggaaaaaggttgatctgccgtatgttgacgctgtcagcacggaaaaagatatgattaaggcgtttctgcgtgttgtcaaagaaaaggatccggacgttctgatcacctataacggcgataattttgacttcgcttacctgaaaaagcgctgcgaaaaactgggtgtgaagttcattctgggccgtgacggttctgaaccgaaaatccagcgtatgggcgatcgctttgcagtcgacgtgaaaggtcgcattcatttcgatctgtatccggtgattcgtcgcaccatcaacctgccgacctatacgctggaagcggtctacgaagccatttttggccgtccgaaagaaaaggtgtatgccgaagaaatcgcacaagcttgggaaaccaatgaaggcctggaacgtgtcgctcgctatagcatggaagatgcgaaagtgacgtacgaactgggcaaggaatttttcccgatggaagcgcagctgtcacgcctgattggccaaccgctgtgggatgtgtcgcgtagctctaccggtaacctggttgaatggttcctgctgcgtaaagcgtatgaacgcaacgaactggcgccgaataaaccgtcgggccgcgaatacgatgaacgtcgcgaaggttatgcgggcggttacgttaaagaaccggaacgtggtctgtgggaaaacatcgtgtacctggattacaaaagtctgtatccgtccattatcattacccataacgtgagcccggacacgctgaatcgcgaaggctgcaaagaatacgatgtcgccccgcaagtgggtcacaaattttgtaaagactttccgggcttcattccgtctctgctgggtgatctgctggaagaacgtcagaaaattaaaaagaaaatgaaagcaaccaaagatccgattgagaaaaaactgctggactatcgtcaacgcgcgatcaaaattctggccaacagttattacggctattacggttatgcgaaagcccgctggtactgcaaagaatgtgcagaatccgttacggcttggggccgtgaatatatcgaaaccacgatccgcgaaatcgaagaaaaatacggtttcaaagtgctgtacgccgataccgacggcttccatgcaacgatcccgggtgaagatgctgaagaaattaagaaaaaagcgaaagaattcctgaaatacatcaacagcaaactgccgggcgccctggaactggaatatgaaggcttctaccgtcgcggctttttcgtgaccaagaaaaaatacgcagttatcgacgaagaaggcaaaattaccacgcgtggtctggaaatcgtgcgtcgcgattggagtgaaattgccaaagaaacccaggcacgcgttctggaagcaatcctgcgtcatggtgacgtcgaagaagccgttcgcattgtcaaagatgtgacggaaaagctgtcgaaatatgaagtcccgccggaaaaactggtgatccatgaacaaattacccgtgaactgaaggattacaaagcgacgggcccgcacgttgcaattgctaaacgcctggcagcccgtggcatcaagattcgtccgggtaccgttatcagctatattgtcctgaaaggctctggtcgcatcggtgatcgtgctattccgtttgatgaattcgacccgacgaaacaccgttacgatgccgaatattacatcgaaaatcaggtgctgccggccgttgaacgcattctgaaagcatttggctataagaaagaagaactgcgctaccagaaaacccgtcaagtgggcctgggtgcgtggctgaagctgaaaggtaagaaataa

SEQ ID NO: 237 - DNA, 2322 bp, Artificial Sequence
  Synthetic
atgattctggacgctgactatattacggaaaatggcaagccggttgtgcgcatcttcaaaaaggaaaatggcgaattcaaggtggaatatgatcgcaactttgaaccgtatatttacgccctgctgaaagatgacagtgcaatcgaagaaattaaaaagatcaccgccgaacgccatggcaccgtggttcgtatcacgaaagcagaaaaggttgaacgtaaatttctgggtcgcccggtggaagtttggaaactgtatttcacgcatccgcaggatgtgccggccattcgtgacaaaatccgctctcacccggcagtcgtggatatttatgaatacgacatcccgtttgccaaacgttatctgattgataagggcctggttccgatggaaggtgacgaagaactgaaaatgctggcttttgatatcgaaaccctgtatcacgaaggcgaagaattcgcggaaggtccgattctgatgatctcatacgcagacgaatcggaagctcgcgtgattacctggaaaaaggttgatctgccgtatgttgacgctgtcagcacggaaaaagatatgattaaggcgtttctgcgtgttgtcaaagaaaaggatccggacgttctgatcacctataacggcgataattttgacttcgcttacctgaaaaagcgctgcgaaaaactgggtgtgaagttcattctgggccgtgacggttctgaaccgaaaatccagcgtatgggcgatcgctttgcagtcgacgtgaaaggtcgcattcatttcgatctgtatccggtgattcgtcgcaccatcaacctgccgacctatacgctggaagcggtctacgaagccatttttggccgtccgaaagaaaaggtgtatgccgaagaaatcgcacaagcttgggaaaccaatgaaggcctggaacgtgtcgctcgctatagcatggaagatgcgaaagtgacgtacgaactgggcaaggaatttttcccgatggaagcgcagctgtcacgcctgattggccaaccgctgtgggatgtgtcgcgtagctctaccggtaacctggttgaatggttcctgctgcgtaaagcgtatgaacgcaacgaactggcgccgaataaaccgtcgggccgcgaatacgatgaacgtcgcgaaggttatgcgggcggttacgttaaagaaccggaacgtggtctgtgggaaaacatcgtgtacctggattacaaaagtctgtatccgtccattatcattacccataacgtgagcccggacacgctgaatcgcgaaggctgcaaagaatacgatgtcgccccgcaagtgggtcacaaattttgtaaagactttccgggcttcattccgtctctgctgggtgatctgctggaagaacgtcagaaaattaaaaagaaaatgaaagcaaccaaagatccgattgagaaaaaactgctggactatcgtcaacgcgcgatcaaaattctggccaacagttattacggctattacggttatgcgaaagcccgctggtactgcaaagaatgtgcagaatccgttacggcttggggccgtgaatatatcgaaaccacgatccgcgaaatcgaagaaaaatacggtttcaaagtgctgtacgccgataccgacggcttccatgcaacgatcccgggtgaagatgctgaagaaattaagaaaaaagcgaaagaattcctgaaatacatcaacagcaaactgccgggcgccctggaactggaatatgaaggcttctaccgtcgcggctttttcgtgaccaagaaaaaatacgcagttatcgacgaagaaggcaaaattaccacgcgtggtctggaaatcgtgcgtcgcgattggagtgaaattgccaaagaaacccaggcacgtgtcctggaagcaatcctgaaacatggtgatgtggaagaagcggttcgcattgtcaaagaagtgacggaaaagctgtcgaaatatgaagttccgccggaaaaactggtcatccatgaacaaattacccgcgatctgcgtgactacaaagccacgggtccgcacgtggcagttgcaaaacgtctggcagcccgtggcgtgaagattcgtccgggtaccgtgatcagttatattgttctgaaaggctccggtcgcatcggtgaccgtgctattccgtttgatgaattcgacccgacgaaacaccgttacgatgccgaatattacatcgaaaatcaggtcctgccggccgtggaacgcattctgaaagcatttggttatcgcaaggaagatctgcgttaccagaagaccaaacaagtcggcctgggtgcgtggctgaaagtgaaaaagtaa

SEQ ID NO: 238 - DNA, 2328 bp, Artificial Sequence
  Synthetic
atgattctggacgctgactatattacggaaaatggcaagccggttgtgcgcatcttcaaaaaggaaaatggcgaattcaaggtggaatatgatcgcaactttgaaccgtatatttacgccctgctgaaagatgacagtgcaatcgaagaaattaaaaagatcaccgccgaacgccatggcaccgtggttcgtatcacgaaagcagaaaaggttgaacgtaaatttctgggtcgcccggtggaagtttggaaactgtatttcacgcatccgcaggatgtgccggccattcgtgacaaaatccgctctcacccggcagtcgtggatatttatgaatacgacatcccgtttgccaaacgttatctgattgataagggcctggttccgatggaaggtgacgaagaactgaaaatgctggcttttgatatcgaaaccctgtatcacgaaggcgaagaattcgcggaaggtccgattctgatgatctcatacgcagacgaatcggaagctcgcgtgattacctggaaaaaggttgatctgccgtatgttgacgctgtcagcacggaaaaagatatgattaaggcgtttctgcgtgttgtcaaagaaaaggatccggacgttctgatcacctataacggcgataattttgacttcgcttacctgaaaaagcgctgcgaaaaactgggtgtgaagttcattctgggccgtgacggttctgaaccgaaaatccagcgtatgggcgatcgctttgcagtcgacgtgaaaggtcgcattcatttcgatctgtatccggtgattcgtcgcaccatcaacctgccgacctatacgctggaagcggtctacgaagccatttttggccgtccgaaagaaaaggtgtatgccgaagaaatcgcacaagcttgggaaaccaatgaaggcctggaacgtgtcgctcgctatagcatggaagatgcgaaagtgacgtacgaactgggcaaggaatttttcccgatggaagcgcagctgtcacgcctgattggccaaccgctgtgggatgtgtcgcgtagctctaccggtaacctggttgaatggttcctgctgcgtaaagcgtatgaacgcaacgaactggcgccgaataaaccgtcgggccgcgaatacgatgaacgtcgcgaaggttatgcgggcggttacgttaaagaaccggaacgtggtctgtgggaaaacatcgtgtacctggattacaaaagtctgtatccgtccattatcattacccataacgtgagcccggacacgctgaatcgcgaaggctgcaaagaatacgatgtcgccccgcaagtgggtcacaaattttgtaaagactttccgggcttcattccgtctctgctgggtgatctgctggaagaacgtcagaaaattaaaaagaaaatgaaagcaaccaaagatccgattgagaaaaaactgctggactatcgtcaacgcgcgatcaaaattctggccaacagttattacggctattacggttatgcgaaagcccgctggtactgcaaagaatgtgcagaatccgttacggcttggggccgtgaatatatcgaaaccacgatccgcgaaatcgaagaaaaatacggtttcaaagtgctgtacgccgataccgacggcttccatgcaacgatcccgggtgaagatgctgaagaaattaagaaaaaagcgaaagaattcctgaaatacatcaacagcaaactgccgggcgccctggaactggaatatgaaggcttctaccgtcgcggctttttcgtgaccaagaaaaaatacgcagttatcgacgaagaaggcaaaattaccacgcgtggtctggaaatcgtgcgtcgcgattggagtgaaattgccaaagaaacccaggcacgtgtgctggaagctctgctgaaagatggcaatgttgaagaagcggtttccattgtcaaagaagtgacggaaaagctgggtaaatatgaagtcccgccggaaaaactggtgatccatgaacaaattacccgcgaactgaaggattacaaagcgacgggcccgcacgttgctatcgcgaaacgtctggcagcgcgtggcgtgaagattcgtccgggtaccgttatcagctatattgtcctgaaaggctctggtcgtatcggtgaccgcgcgattccgtttgatgaattcgacccgacgaaacatcgctacgatgcagaatattacatcgaaaaccaggttctgccggctgtcgaacgtattctgaaagcgtttggctatcgtgccgaagatctgcgctaccagaaaacccgtcaagtgggcctgggtgtttggctgcaaccgaaaggtaagaaataa

SEQ ID NO: 239 - DNA, 2325 bp, Artificial Sequence
  Synthetic
atgattctggacgctgactatattacggaaaatggcaagccggttgtgcgcatcttcaaaaaggaaaatggcgaattcaaggtggaatatgatcgcaactttgaaccgtatatttacgccctgctgaaagatgacagtgcaatcgaagaaattaaaaagatcaccgccgaacgccatggcaccgtggttcgtatcacgaaagcagaaaaggttgaacgtaaatttctgggtcgcccggtggaagtttggaaactgtatttcacgcatccgcaggatgtgccggccattcgtgacaaaatccgctctcacccggcagtcgtggatatttatgaatacgacatcccgtttgccaaacgttatctgattgataagggcctggttccgatggaaggtgacgaagaactgaaaatgctggcttttgatatcgaaaccctgtatcacgaaggcgaagaattcgcggaaggtccgattctgatgatctcatacgcagacgaatcggaagctcgcgtgattacctggaaaaaggttgatctgccgtatgttgacgctgtcagcacggaaaaagatatgattaaggcgtttctgcgtgttgtcaaagaaaaggatccggacgttctgatcacctataacggcgataattttgacttcgcttacctgaaaaagcgctgcgaaaaactgggtgtgaagttcattctgggccgtgacggttctgaaccgaaaatccagcgtatgggcgatcgctttgcagtcgacgtgaaaggtcgcattcatttcgatctgtatccggtgattcgtcgcaccatcaacctgccgacctatacgctggaagcggtctacgaagccatttttggccgtccgaaagaaaaggtgtatgccgaagaaatcgcacaagcttgggaaaccaatgaaggcctggaacgtgtcgctcgctatagcatggaagatgcgaaagtgacgtacgaactgggcaaggaatttttcccgatggaagcgcagctgtcacgcctgattggccaaccgctgtgggatgtgtcgcgtagctctaccggtaacctggttgaatggttcctgctgcgtaaagcgtatgaacgcaacgaactggcgccgaataaaccgtcgggccgcgaatacgatgaacgtcgcgaaggttatgcgggcggttacgttaaagaaccggaacgtggtctgtgggaaaacatcgtgtacctggattacaaaagtctgtatccgtccattatcattacccataacgtgagcccggacacgctgaatcgcgaaggctgcaaagaatacgatgtcgccccgcaagtgggtcacaaattttgtaaagactttccgggcttcattccgtctctgctgggtgatctgctggaagaacgtcagaaaattaaaaagaaaatgaaagcaaccaaagatccgattgagaaaaaactgctggactatcgtcaacgcgcgatcaaaattctggccaacagttattacggctattacggttatgcgaaagcccgctggtactgcaaagaatgtgcagaatccgttacggcttggggccgtgaatatatcgaaaccacgatccgcgaaatcgaagaaaaatacggtttcaaagtgctgtacgccgataccgacggcttccatgcaacgatcccgggtgaagatgctgaagaaattaagaaaaaagcgaaagaattcctgaaatacatcaacagcaaactgccgggcgccctggaactggaatatgaaggcttctaccgtcgcggctttttcgtgaccaagaaaaaatacgcagttatcgacgaagaaggcaaaattaccacgcgtggtctggaaatcgtgcgtcgcgattggagtgaaattgccaaagaaacccaggcaaaggttctggaagcaattctgaaacatggtaacgtcgaagaagcggtcaagatcgtgaaagaagttaccgaaaaactgtcgaattatgaaattccggtcgaaaagctggtgatctacgaacaaattacgcgcccgctgaacgaatataaagccattggcccgcacgtggcagttgctaaacgtctggcggccaagggtatcaagattaaaccgggcatggtgattggttatgttgtcctgcgcggcgatggtccgatcagcaaacgtgcgatcgccatcgaagaattcgatggcaaaaagcataagtacgacgcagaatactacatcgaaaatcaggttctgccggccgtcgaacgtatcctgaaagcattcggttataagcgtgaagatctgcgctggcagaagaccaaacaagtgggcctgggtgcgtggctgaaagttaaaaagtcttaa

SEQ ID NO: 240 - DNA, 2328 bp, Artificial Sequence
  Synthetic
atgattctggacgctgactatattacggaaaatggcaagccggttgtgcgcatcttcaaaaaggaaaatggcgaattcaaggtggaatatgatcgcaactttgaaccgtatatttacgccctgctgaaagatgacagtgcaatcgaagaaattaaaaagatcaccgccgaacgccatggcaccgtggttcgtatcacgaaagcagaaaaggttgaacgtaaatttctgggtcgcccggtggaagtttggaaactgtatttcacgcatccgcaggatgtgccggccattcgtgacaaaatccgctctcacccggcagtcgtggatatttatgaatacgacatcccgtttgccaaacgttatctgattgataagggcctggttccgatggaaggtgacgaagaactgaaaatgctggcttttgatatcgaaaccctgtatcacgaaggcgaagaattcgcggaaggtccgattctgatgatctcatacgcagacgaatcggaagctcgcgtgattacctggaaaaaggttgatctgccgtatgttgacgctgtcagcacggaaaaagatatgattaaggcgtttctgcgtgttgtcaaagaaaaggatccggacgttctgatcacctataacggcgataattttgacttcgcttacctgaaaaagcgctgcgaaaaactgggtgtgaagttcattctgggccgtgacggttctgaaccgaaaatccagcgtatgggcgatcgctttgcagtcgacgtgaaaggtcgcattcatttcgatctgtatccggtgattcgtcgcaccatcaacctgccgacctatacgctggaagcggtctacgaagccatttttggccgtccgaaagaaaaggtgtatgccgaagaaatcgcacaagcttgggaaaccaatgaaggcctggaacgtgtcgctcgctatagcatggaagatgcgaaagtgacgtacgaactgggcaaggaatttttcccgatggaagcgcagctgtcacgcctgattggccaaccgctgtgggatgtgtcgcgtagctctaccggtaacctggttgaatggttcctgctgcgtaaagcgtatgaacgcaacgaactggcgccgaataaaccgtcgggccgcgaatacgatgaacgtcgcgaaggttatgcgggcggttacgttaaagaaccggaacgtggtctgtgggaaaacatcgtgtacctggattacaaaagtctgtatccgtccattatcattacccataacgtgagcccggacacgctgaatcgcgaaggctgcaaagaatacgatgtcgccccgcaagtgggtcacaaattttgtaaagactttccgggcttcattccgtctctgctgggtgatctgctggaagaacgtcagaaaattaaaaagaaaatgaaagcaaccaaagatccgattgagaaaaaactgctggactatcgtcaacgcgcgatcaaaattctggccaacagttattacggctattacggttatgcgaaagcccgctggtactgcaaagaatgtgcagaatccgttacggcttggggccgtgaatatatcgaaaccacgatccgcgaaatcgaagaaaaatacggtttcaaagtgctgtacgccgataccgacggcttccatgcaacgatcccgggtgaagatgctgaagaaattaagaaaaaagcgaaagaattcctgaaatacatcaacagcaaactgccgggcgccctggaactggaatatgaaggcttctaccgtcgcggctttttcgtgaccaagaaaaaatacgcagttatcgacgaagaaggcaaaattaccacgcgtggtctggaaatcgtgcgtcgcgattggagtgaaattgccaaagaaacccaggcacgtgttctggaagcactgctgaaagatggtaatgtcgaagaagcagtgagtattgttaaagaagtcacggaaaaactgtccaagtatgaagtcccgccggaaaaactggtgattcatgaacaaatcacccgcgaactgaaagattacaaggcgacgggcccgcacgtggcaattgctaaacgtctggcagcgcgtggcgttaagatccgtccgggtaccgttattagctatatcgtcctgaaaggctctggtcgtattggtgaccgcgccatcccgtttgatgaattcgacccggctaaacaccgctacgatgcggaatattacattgaaaatcaggtcctgccggctgtggaacgtatcctgaaagcgtttggctatcgtaaggaagatctgcgctaccagaaaacccgtcaagtgggcctgggtgcgtggctgaaaccgaagggtaaaaagtaa

SEQ ID NO: 241 - DNA, 2328 bp, Artificial Sequence
  Synthetic
atgattctggacgctgactatattacggaaaatggcaagccggttgtgcgcatcttcaaaaaggaaaatggcgaattcaaggtggaatatgatcgcaactttgaaccgtatatttacgccctgctgaaagatgacagtgcaatcgaagaaattaaaaagatcaccgccgaacgccatggcaccgtggttcgtatcacgaaagcagaaaaggttgaacgtaaatttctgggtcgcccggtggaagtttggaaactgtatttcacgcatccgcaggatgtgccggccattcgtgacaaaatccgctctcacccggcagtcgtggatatttatgaatacgacatcccgtttgccaaacgttatctgattgataagggcctggttccgatggaaggtgacgaagaactgaaaatgctggcttttgatatcgaaaccctgtatcacgaaggcgaagaattcgcggaaggtccgattctgatgatctcatacgcagacgaatcggaagctcgcgtgattacctggaaaaaggttgatctgccgtatgttgacgctgtcagcacggaaaaagatatgattaaggcgtttctgcgtgttgtcaaagaaaaggatccggacgttctgatcacctataacggcgataattttgacttcgcttacctgaaaaagcgctgcgaaaaactgggtgtgaagttcattctgggccgtgacggttctgaaccgaaaatccagcgtatgggcgatcgctttgcagtcgacgtgaaaggtcgcattcatttcgatctgtatccggtgattcgtcgcaccatcaacctgccgacctatacgctggaagcggtctacgaagccatttttggccgtccgaaagaaaaggtgtatgccgaagaaatcgcacaagcttgggaaaccaatgaaggcctggaacgtgtcgctcgctatagcatggaagatgcgaaagtgacgtacgaactgggcaaggaatttttcccgatggaagcgcagctgtcacgcctgattggccaaccgctgtgggatgtgtcgcgtagctctaccggtaacctggttgaatggttcctgctgcgtaaagcgtatgaacgcaacgaactggcgccgaataaaccgtcgggccgcgaatacgatgaacgtcgcgaaggttatgcgggcggttacgttaaagaaccggaacgtggtctgtgggaaaacatcgtgtacctggattacaaaagtctgtatccgtccattatcattacccataacgtgagcccggacacgctgaatcgcgaaggctgcaaagaatacgatgtcgccccgcaagtgggtcacaaattttgtaaagactttccgggcttcattccgtctctgctgggtgatctgctggaagaacgtcagaaaattaaaaagaaaatgaaagcaaccaaagatccgattgagaaaaaactgctggactatcgtcaacgcgcgatcaaaattctggccaacagttattacggctattacggttatgcgaaagcccgctggtactgcaaagaatgtgcagaatccgttacggcttggggccgtgaatatatcgaaaccacgatccgcgaaatcgaagaaaaatacggtttcaaagtgctgtacgccgataccgacggcttccatgcaacgatcccgggtgaagatgctgaagaaattaagaaaaaagcgaaagaattcctgaaatacatcaacagcaaactgccgggcgccctggaactggaatatgaaggcttctaccgtcgcggctttttcgtgaccaagaaaaaatacgcagttatcgacgaagaaggcaaaattaccacgcgtggtctggaaatcgtgcgtcgcgattggagtgaaattgccaaagaaacccaggcacgcgtcctggaagcaatcctgaaagatggtgacgtggaagaagccgtccgtattgtgaaagaagttacggaaaaactgtccaaatatgaagttccgccggaaaaactggtcatccatgaacaaattacccgcgaactgaaagattacaaagcgacgggcccgcacgtcgcaatcgctaaacgtctggcggcgcgtggcgtgaaaattcgtccgggtaccgtgatctcatatattgttctgaaaggctcgggtcgtatcggtgaccgcgctattccgtttgatgaattcgacccgaaaaaacacaaatacgatgcggaatactacatcgaaaaccaggttctgccggccgtcgaacgtattctgcgcgcatttggctaccgtaaagaagatctgcgttatcaaaaaaccaaacaagtgggtctgggtgcgtggctgaaaccgaaaggtaaaaaataa

SEQ ID NO: 242 - DNA, 2325 bp, Artificial Sequence
  Synthetic
atgattctggacgctgactatattacggaaaatggcaagccggttgtgcgcatcttcaaaaaggaaaatggcgaattcaaggtggaatatgatcgcaactttgaaccgtatatttacgccctgctgaaagatgacagtgcaatcgaagaaattaaaaagatcaccgccgaacgccatggcaccgtggttcgtatcacgaaagcagaaaaggttgaacgtaaatttctgggtcgcccggtggaagtttggaaactgtatttcacgcatccgcaggatgtgccggccattcgtgacaaaatccgctctcacccggcagtcgtggatatttatgaatacgacatcccgtttgccaaacgttatctgattgataagggcctggttccgatggaaggtgacgaagaactgaaaatgctggcttttgatatcgaaaccctgtatcacgaaggcgaagaattcgcggaaggtccgattctgatgatctcatacgcagacgaatcggaagctcgcgtgattacctggaaaaaggttgatctgccgtatgttgacgctgtcagcacggaaaaagatatgattaaggcgtttctgcgtgttgtcaaagaaaaggatccggacgttctgatcacctataacggcgataattttgacttcgcttacctgaaaaagcgctgcgaaaaactgggtgtgaagttcattctgggccgtgacggttctgaaccgaaaatccagcgtatgggcgatcgctttgcagtcgacgtgaaaggtcgcattcatttcgatctgtatccggtgattcgtcgcaccatcaacctgccgacctatacgctggaagcggtctacgaagccatttttggccgtccgaaagaaaaggtgtatgccgaagaaatcgcacaagcttgggaaaccaatgaaggcctggaacgtgtcgctcgctatagcatggaagatgcgaaagtgacgtacgaactgggcaaggaatttttcccgatggaagcgcagctgtcacgcctgattggccaaccgctgtgggatgtgtcgcgtagctctaccggtaacctggttgaatggttcctgctgcgtaaagcgtatgaacgcaacgaactggcgccgaataaaccgtcgggccgcgaatacgatgaacgtcgcgaaggttatgcgggcggttacgttaaagaaccggaacgtggtctgtgggaaaacatcgtgtacctggattacaaaagtctgtatccgtccattatcattacccataacgtgagcccggacacgctgaatcgcgaaggctgcaaagaatacgatgtcgccccgcaagtgggtcacaaattttgtaaagactttccgggcttcattccgtctctgctgggtgatctgctggaagaacgtcagaaaattaaaaagaaaatgaaagcaaccaaagatccgattgagaaaaaactgctggactatcgtcaacgcgcgatcaaaattctggccaacagttattacggctattacggttatgcgaaagcccgctggtactgcaaagaatgtgcagaatccgttacggcttggggccgtgaatatatcgaaaccacgatccgcgaaatcgaagaaaaatacggtttcaaagtgctgtacgccgataccgacggcttccatgcaacgatcccgggtgaagatgctgaagaaattaagaaaaaagcgaaagaattcctgaaatacatcaacagcaaactgccgggcgccctggaactggaatatgaaggcttctaccgtcgcggctttttcgtgaccaagaaaaaatacgcagttatcgacgaagaaggcaaaattaccacgcgtggtctggaaatcgtgcgtcgcgattggagtgaaattgccaaagaaacccaggcacgtgttctggaagcaattctgaaacatggtaacgtcgaagaagcggtcaaaatcgtgaaagaagttacggaaaaactgtctaactacgaaattccgccggaaaaactggccatctacgaacaaattacccgcccgctgcatgaatataaagcaatcggtccgcacgtcgcagtggcaaaacgtctggcagcacgcggcgttaaagtcaaaccgggtatggtcatcggctatattgtgctgcgtggtgatggcccgatcagcaaccgcgcaattctggctgaagaatacgatctgaaaaaacacaaatacgacgccgaatattacatcgaaaatcaggttctgccggctgtcctgcgtattctggaagcgtttggctatcgtaaagaagatctgcgctggcagaaaacccgtcaaacgggtctgacctcatggctgaatattaaaaaatcgtaa

SEQ ID NO: 243 - DNA, 2325 bp, Artificial Sequence
  Synthetic
atgattctggacgctgactatattacggaaaatggcaagccggttgtgcgcatcttcaaaaaggaaaatggcgaattcaaggtggaatatgatcgcaactttgaaccgtatatttacgccctgctgaaagatgacagtgcaatcgaagaaattaaaaagatcaccgccgaacgccatggcaccgtggttcgtatcacgaaagcagaaaaggttgaacgtaaatttctgggtcgcccggtggaagtttggaaactgtatttcacgcatccgcaggatgtgccggccattcgtgacaaaatccgctctcacccggcagtcgtggatatttatgaatacgacatcccgtttgccaaacgttatctgattgataagggcctggttccgatggaaggtgacgaagaactgaaaatgctggcttttgatatcgaaaccctgtatcacgaaggcgaagaattcgcggaaggtccgattctgatgatctcatacgcagacgaatcggaagctcgcgtgattacctggaaaaaggttgatctgccgtatgttgacgctgtcagcacggaaaaagatatgattaaggcgtttctgcgtgttgtcaaagaaaaggatccggacgttctgatcacctataacggcgataattttgacttcgcttacctgaaaaagcgctgcgaaaaactgggtgtgaagttcattctgggccgtgacggttctgaaccgaaaatccagcgtatgggcgatcgctttgcagtcgacgtgaaaggtcgcattcatttcgatctgtatccggtgattcgtcgcaccatcaacctgccgacctatacgctggaagcggtctacgaagccatttttggccgtccgaaagaaaaggtgtatgccgaagaaatcgcacaagcttgggaaaccaatgaaggcctggaacgtgtcgctcgctatagcatggaagatgcgaaagtgacgtacgaactgggcaaggaatttttcccgatggaagcgcagctgtcacgcctgattggccaaccgctgtgggatgtgtcgcgtagctctaccggtaacctggttgaatggttcctgctgcgtaaagcgtatgaacgcaacgaactggcgccgaataaaccgtcgggccgcgaatacgatgaacgtcgcgaaggttatgcgggcggttacgttaaagaaccggaacgtggtctgtgggaaaacatcgtgtacctggattacaaaagtctgtatccgtccattatcattacccataacgtgagcccggacacgctgaatcgcgaaggctgcaaagaatacgatgtcgccccgcaagtgggtcacaaattttgtaaagactttccgggcttcattccgtctctgctgggtgatctgctggaagaacgtcagaaaattaaaaagaaaatgaaagcaaccaaagatccgattgagaaaaaactgctggactatcgtcaacgcgcgatcaaaattctggccaacagttattacggctattacggttatgcgaaagcccgctggtactgcaaagaatgtgcagaatccgttacggcttggggccgtgaatatatcgaaaccacgatccgcgaaatcgaagaaaaatacggtttcaaagtgctgtacgccgataccgacggcttccatgcaacgatcccgggtgaagatgctgaagaaattaagaaaaaagcgaaagaattcctgaaatacatcaacagcaaactgccgggcgccctggaactggaatatgaaggcttctaccgtcgcggctttttcgtgaccaagaaaaaatacgcagttatcgacgaagaaggcaaaattaccacgcgtggtctggaaatcgtgcgtcgcgattggagtgaaattgccaaagaaacccaggcaaaagttctggaagcaatcctgaaacatggtaatgtcgaagaagcagtgaaaattgtcaaggaagtgacggaaaaactgtcgaagtatgaaatcccgccggaaaaactggtgatctacgaacaaattacccgcccgctgcatgaatataaagcgattggcccgcacgtggcagttgctaaacgtctggcagcccgcggtgtcaaagtgcgtccgggcatggtgatcggttatattgttctgcgtggcgatggtccgatcagtaaacgcgcgattctggccgaagaatttgatccgcgcaaacacaagtacgacgccgaatattacatcgaaaaccaggtgctgccggctgttctgcgtattctggaagcgttcggctatcgtaaagaagatctgcgctggcagaaaaccaagcaaacgggtctgaccgcatggctgaatgtgaaaaagaaataa

SEQ ID NO: 244 - DNA, 2331 bp, Artificial Sequence
  Synthetic
atgattctggacgctgactatattacggaaaatggcaagccggttgtgcgcatcttcaaaaaggaaaatggcgaattcaaggtggaatatgatcgcaactttgaaccgtatatttacgccctgctgaaagatgacagtgcaatcgaagaaattaaaaagatcaccgccgaacgccatggcaccgtggttcgtatcacgaaagcagaaaaggttgaacgtaaatttctgggtcgcccggtggaagtttggaaactgtatttcacgcatccgcaggatgtgccggccattcgtgacaaaatccgctctcacccggcagtcgtggatatttatgaatacgacatcccgtttgccaaacgttatctgattgataagggcctggttccgatggaaggtgacgaagaactgaaaatgctggcttttgatatcgaaaccctgtatcacgaaggcgaagaattcgcggaaggtccgattctgatgatctcatacgcagacgaatcggaagctcgcgtgattacctggaaaaaggttgatctgccgtatgttgacgctgtcagcacggaaaaagatatgattaaggcgtttctgcgtgttgtcaaagaaaaggatccggacgttctgatcacctataacggcgataattttgacttcgcttacctgaaaaagcgctgcgaaaaactgggtgtgaagttcattctgggccgtgacggttctgaaccgaaaatccagcgtatgggcgatcgctttgcagtcgacgtgaaaggtcgcattcatttcgatctgtatccggtgattcgtcgcaccatcaacctgccgacctatacgctggaagcggtctacgaagccatttttggccgtccgaaagaaaaggtgtatgccgaagaaatcgcacaagcttgggaaaccaatgaaggcctggaacgtgtcgctcgctatagcatggaagatgcgaaagtgacgtacgaactgggcaaggaatttttcccgatggaagcgcagctgtcacgcctgattggccaaccgctgtgggatgtgtcgcgtagctctaccggtaacctggttgaatggttcctgctgcgtaaagcgtatgaacgcaacgaactggcaccgaataaaccggatgaacgtgaatatgaacgtcgcctgcgcgaatcttatgccggcggttacgttaaggaaccggaaaaaggcctgtgggaaggtctggtgtctctggattttcgctcactgtacccgtcgattatcattacgcataacgtgtccccggacaccctgaatcgtgaaggctgcatggaatatgatgttgctccggaagtcaaacacaagttttgtaaagactttccgggtttcattccgtcactgctgaaacgtctgctggatgaacgccaggaaatcaaacgtcgcatgaaagcctcgaaggatccgattgaaaagaaaatgctggactatcgtcaacgcgcaatcaaaattctggctaatagctattacggctattacggttatgcgaaggcccgctggtactgcaaagaatgtgcggaatctgtcacggcctggggccgtgaatatatcgaatttgtgcgcaaagaactggaagaaaagttcggtttcaaggttctgtacattgatacggacggcctgtacgcaaccatcccgggtgctaaaccggaagaaattaagcgtaaggccctggaatttgtggaatacatcaacgcaaaactgccgggcctgctggaactggaatatgaaggcttctacgttcgcggctttttcgtcacgaagaaaaagtatgcgctgattgacgaagaaggcaaaatcattacccgtggtctggaaatcgttcgtcgcgattggagtgaaattgccaaagaaacccaggcacgcgttctggaagcaatcctgcgtcatggtgacgtcgaagaagccgttcgcattgtcaaagatgtgacggaaaagctgtcgaaatatgaagtcccgccggaaaaactggtgatccatgaacaaattacccgtgaactgaaggattacaaagcgacgggcccgcacgttgcaattgctaaacgcctggcagcccgtggcatcaagattcgtccgggtaccgttatcagctatattgtcctgaaaggctctggtcgcatcggtgatcgtgctattccgtttgatgaattcgacccgacgaaacaccgttacgatgccgaatattacatcgaaaatcaggtgctgccggccgttgaacgcattctgaaagcatttggctataagaaagaagaactgcgctaccagaaaacccgtcaagtgggcctgggtgcgtggctgaagctgaaaggtaagaaataa

SEQ ID NO: 245 - DNA, 2325 bp, Artificial Sequence
  Synthetic
atgattctggacgctgactatattacggaaaatggcaagccggttgtgcgcatcttcaaaaaggaaaatggcgaattcaaggtggaatatgatcgcaactttgaaccgtatatttacgccctgctgaaagatgacagtgcaatcgaagaaattaaaaagatcaccgccgaacgccatggcaccgtggttcgtatcacgaaagcagaaaaggttgaacgtaaatttctgggtcgcccggtggaagtttggaaactgtatttcacgcatccgcaggatgtgccggccattcgtgacaaaatccgctctcacccggcagtcgtggatatttatgaatacgacatcccgtttgccaaacgttatctgattgataagggcctggttccgatggaaggtgacgaagaactgaaaatgctggcttttgatatcgaaaccctgtatcacgaaggcgaagaattcgcggaaggtccgattctgatgatctcatacgcagacgaatcggaagctcgcgtgattacctggaaaaaggttgatctgccgtatgttgacgctgtcagcacggaaaaagatatgattaaggcgtttctgcgtgttgtcaaagaaaaggatccggacgttctgatcacctataacggcgataattttgacttcgcttacctgaaaaagcgctgcgaaaaactgggtgtgaagttcattctgggccgtgacggttctgaaccgaaaatccagcgtatgggcgatcgctttgcagtcgacgtgaaaggtcgcattcatttcgatctgtatccggtgattcgtcgcaccatcaacctgccgacctatacgctggaagcggtctacgaagccatttttggccgtccgaaagaaaaggtgtatgccgaagaaatcgcacaagcttgggaaaccaatgaaggcctggaacgtgtcgctcgctatagcatggaagatgcgaaagtgacgtacgaactgggcaaggaatttttcccgatggaagcgcagctgtcacgcctgattggccaaccgctgtgggatgtgtcgcgtagctctaccggtaacctggttgaatggttcctgctgcgtaaagcgtatgaacgcaacgaactggcaccgaataaaccggatgaacgtgaatatgaacgtcgcctgcgcgaatcttatgccggcggttacgttaaggaaccggaaaaaggcctgtgggaaggtctggtgtctctggattttcgctcactgtacccgtcgattatcattacgcataacgtgtccccggacaccctgaatcgtgaaggctgcatggaatatgatgttgctccggaagtcaaacacaagttttgtaaagactttccgggtttcattccgtcactgctgaaacgtctgctggatgaacgccaggaaatcaaacgtcgcatgaaagcctcgaaggatccgattgaaaagaaaatgctggactatcgtcaacgcgcaatcaaaattctggctaatagctattacggctattacggttatgcgaaggcccgctggtactgcaaagaatgtgcggaatctgtcacggcctggggccgtgaatatatcgaatttgtgcgcaaagaactggaagaaaagttcggtttcaaggttctgtacattgatacggacggcctgtacgcaaccatcccgggtgctaaaccggaagaaattaagcgtaaggccctggaatttgtggaatacatcaacgcaaaactgccgggcctgctggaactggaatatgaaggcttctacgttcgcggctttttcgtcacgaagaaaaagtatgcgctgattgacgaagaaggcaaaatcattacccgtggtctggaaatcgttcgtcgcgattggagtgaaattgccaaagaaacccaggcacgtgtcctggaagcaatcctgaaacatggtgatgtggaagaagcggttcgcattgtcaaagaagtgacggaaaagctgtcgaaatatgaagttccgccggaaaaactggtcatccatgaacaaattacccgcgatctgcgtgactacaaagccacgggtccgcacgtggcagttgcaaaacgtctggcagcccgtggcgtgaagattcgtccgggtaccgtgatcagttatattgttctgaaaggctccggtcgcatcggtgaccgtgctattccgtttgatgaattcgacccgacgaaacaccgttacgatgccgaatattacatcgaaaatcaggtcctgccggccgtggaacgcattctgaaagcatttggttatcgcaaggaagatctgcgttaccagaagaccaaacaagtcggcctgggtgcgtggctgaaagtgaaaaagtaa

SEQ ID NO: 246 - DNA, 2331 bp, Artificial Sequence
  Synthetic
atgattctggacgctgactatattacggaaaatggcaagccggttgtgcgcatcttcaaaaaggaaaatggcgaattcaaggtggaatatgatcgcaactttgaaccgtatatttacgccctgctgaaagatgacagtgcaatcgaagaaattaaaaagatcaccgccgaacgccatggcaccgtggttcgtatcacgaaagcagaaaaggttgaacgtaaatttctgggtcgcccggtggaagtttggaaactgtatttcacgcatccgcaggatgtgccggccattcgtgacaaaatccgctctcacccggcagtcgtggatatttatgaatacgacatcccgtttgccaaacgttatctgattgataagggcctggttccgatggaaggtgacgaagaactgaaaatgctggcttttgatatcgaaaccctgtatcacgaaggcgaagaattcgcggaaggtccgattctgatgatctcatacgcagacgaatcggaagctcgcgtgattacctggaaaaaggttgatctgccgtatgttgacgctgtcagcacggaaaaagatatgattaaggcgtttctgcgtgttgtcaaagaaaaggatccggacgttctgatcacctataacggcgataattttgacttcgcttacctgaaaaagcgctgcgaaaaactgggtgtgaagttcattctgggccgtgacggttctgaaccgaaaatccagcgtatgggcgatcgctttgcagtcgacgtgaaaggtcgcattcatttcgatctgtatccggtgattcgtcgcaccatcaacctgccgacctatacgctggaagcggtctacgaagccatttttggccgtccgaaagaaaaggtgtatgccgaagaaatcgcacaagcttgggaaaccaatgaaggcctggaacgtgtcgctcgctatagcatggaagatgcgaaagtgacgtacgaactgggcaaggaatttttcccgatggaagcgcagctgtcacgcctgattggccaaccgctgtgggatgtgtcgcgtagctctaccggtaacctggttgaatggttcctgctgcgtaaagcgtatgaacgcaacgaactggcaccgaataaaccggatgaacgtgaatatgaacgtcgcctgcgcgaatcttatgccggcggttacgttaaggaaccggaaaaaggcctgtgggaaggtctggtgtctctggattttcgctcactgtacccgtcgattatcattacgcataacgtgtccccggacaccctgaatcgtgaaggctgcatggaatatgatgttgctccggaagtcaaacacaagttttgtaaagactttccgggtttcattccgtcactgctgaaacgtctgctggatgaacgccaggaaatcaaacgtcgcatgaaagcctcgaaggatccgattgaaaagaaaatgctggactatcgtcaacgcgcaatcaaaattctggctaatagctattacggctattacggttatgcgaaggcccgctggtactgcaaagaatgtgcggaatctgtcacggcctggggccgtgaatatatcgaatttgtgcgcaaagaactggaagaaaagttcggtttcaaggttctgtacattgatacggacggcctgtacgcaaccatcccgggtgctaaaccggaagaaattaagcgtaaggccctggaatttgtggaatacatcaacgcaaaactgccgggcctgctggaactggaatatgaaggcttctacgttcgcggctttttcgtcacgaagaaaaagtatgcgctgattgacgaagaaggcaaaatcattacccgtggtctggaaatcgttcgtcgcgattggagtgaaattgccaaagaaacccaggcacgtgtgctggaagctctgctgaaagatggcaatgttgaagaagcggtttccattgtcaaagaagtgacggaaaagctgggtaaatatgaagtcccgccggaaaaactggtgatccatgaacaaattacccgcgaactgaaggattacaaagcgacgggcccgcacgttgctatcgcgaaacgtctggcagcgcgtggcgtgaagattcgtccgggtaccgttatcagctatattgtcctgaaaggctctggtcgtatcggtgaccgcgcgattccgtttgatgaattcgacccgacgaaacatcgctacgatgcagaatattacatcgaaaaccaggttctgccggctgtcgaacgtattctgaaagcgtttggctatcgtgccgaagatctgcgctaccagaaaacccgtcaagtgggcctgggtgtttggctgcaaccgaaaggtaagaaataa

SEQ ID NO: 247 - DNA, 2328 bp, Artificial Sequence
  Synthetic
atgattctggacgctgactatattacggaaaatggcaagccggttgtgcgcatcttcaaaaaggaaaatggcgaattcaaggtggaatatgatcgcaactttgaaccgtatatttacgccctgctgaaagatgacagtgcaatcgaagaaattaaaaagatcaccgccgaacgccatggcaccgtggttcgtatcacgaaagcagaaaaggttgaacgtaaatttctgggtcgcccggtggaagtttggaaactgtatttcacgcatccgcaggatgtgccggccattcgtgacaaaatccgctctcacccggcagtcgtggatatttatgaatacgacatcccgtttgccaaacgttatctgattgataagggcctggttccgatggaaggtgacgaagaactgaaaatgctggcttttgatatcgaaaccctgtatcacgaaggcgaagaattcgcggaaggtccgattctgatgatctcatacgcagacgaatcggaagctcgcgtgattacctggaaaaaggttgatctgccgtatgttgacgctgtcagcacggaaaaagatatgattaaggcgtttctgcgtgttgtcaaagaaaaggatccggacgttctgatcacctataacggcgataattttgacttcgcttacctgaaaaagcgctgcgaaaaactgggtgtgaagttcattctgggccgtgacggttctgaaccgaaaatccagcgtatgggcgatcgctttgcagtcgacgtgaaaggtcgcattcatttcgatctgtatccggtgattcgtcgcaccatcaacctgccgacctatacgctggaagcggtctacgaagccatttttggccgtccgaaagaaaaggtgtatgccgaagaaatcgcacaagcttgggaaaccaatgaaggcctggaacgtgtcgctcgctatagcatggaagatgcgaaagtgacgtacgaactgggcaaggaatttttcccgatggaagcgcagctgtcacgcctgattggccaaccgctgtgggatgtgtcgcgtagctctaccggtaacctggttgaatggttcctgctgcgtaaagcgtatgaacgcaacgaactggcaccgaataaaccggatgaacgtgaatatgaacgtcgcctgcgcgaatcttatgccggcggttacgttaaggaaccggaaaaaggcctgtgggaaggtctggtgtctctggattttcgctcactgtacccgtcgattatcattacgcataacgtgtccccggacaccctgaatcgtgaaggctgcatggaatatgatgttgctccggaagtcaaacacaagttttgtaaagactttccgggtttcattccgtcactgctgaaacgtctgctggatgaacgccaggaaatcaaacgtcgcatgaaagcctcgaaggatccgattgaaaagaaaatgctggactatcgtcaacgcgcaatcaaaattctggctaatagctattacggctattacggttatgcgaaggcccgctggtactgcaaagaatgtgcggaatctgtcacggcctggggccgtgaatatatcgaatttgtgcgcaaagaactggaagaaaagttcggtttcaaggttctgtacattgatacggacggcctgtacgcaaccatcccgggtgctaaaccggaagaaattaagcgtaaggccctggaatttgtggaatacatcaacgcaaaactgccgggcctgctggaactggaatatgaaggcttctacgttcgcggctttttcgtcacgaagaaaaagtatgcgctgattgacgaagaaggcaaaatcattacccgtggtctggaaatcgttcgtcgcgattggagtgaaattgccaaagaaacccaggcaaaggttctggaagcaattctgaaacatggtaacgtcgaagaagcggtcaagatcgtgaaagaagttaccgaaaaactgtcgaattatgaaattccggtcgaaaagctggtgatctacgaacaaattacgcgcccgctgaacgaatataaagccattggcccgcacgtggcagttgctaaacgtctggcggccaagggtatcaagattaaaccgggcatggtgattggttatgttgtcctgcgcggcgatggtccgatcagcaaacgtgcgatcgccatcgaagaattcgatggcaaaaagcataagtacgacgcagaatactacatcgaaaatcaggttctgccggccgtcgaacgtatcctgaaagcattcggttataagcgtgaagatctgcgctggcagaagaccaaacaagtgggcctgggtgcgtggctgaaagttaaaaagtcttaa

SEQ ID NO: 248 - DNA, 2331 bp, Artificial Sequence
  Synthetic
atgattctggacgctgactatattacggaaaatggcaagccggttgtgcgcatcttcaaaaaggaaaatggcgaattcaaggtggaatatgatcgcaactttgaaccgtatatttacgccctgctgaaagatgacagtgcaatcgaagaaattaaaaagatcaccgccgaacgccatggcaccgtggttcgtatcacgaaagcagaaaaggttgaacgtaaatttctgggtcgcccggtggaagtttggaaactgtatttcacgcatccgcaggatgtgccggccattcgtgacaaaatccgctctcacccggcagtcgtggatatttatgaatacgacatcccgtttgccaaacgttatctgattgataagggcctggttccgatggaaggtgacgaagaactgaaaatgctggcttttgatatcgaaaccctgtatcacgaaggcgaagaattcgcggaaggtccgattctgatgatctcatacgcagacgaatcggaagctcgcgtgattacctggaaaaaggttgatctgccgtatgttgacgctgtcagcacggaaaaagatatgattaaggcgtttctgcgtgttgtcaaagaaaaggatccggacgttctgatcacctataacggcgataattttgacttcgcttacctgaaaaagcgctgcgaaaaactgggtgtgaagttcattctgggccgtgacggttctgaaccgaaaatccagcgtatgggcgatcgctttgcagtcgacgtgaaaggtcgcattcatttcgatctgtatccggtgattcgtcgcaccatcaacctgccgacctatacgctggaagcggtctacgaagccatttttggccgtccgaaagaaaaggtgtatgccgaagaaatcgcacaagcttgggaaaccaatgaaggcctggaacgtgtcgctcgctatagcatggaagatgcgaaagtgacgtacgaactgggcaaggaatttttcccgatggaagcgcagctgtcacgcctgattggccaaccgctgtgggatgtgtcgcgtagctctaccggtaacctggttgaatggttcctgctgcgtaaagcgtatgaacgcaacgaactggcaccgaataaaccggatgaacgtgaatatgaacgtcgcctgcgcgaatcttatgccggcggttacgttaaggaaccggaaaaaggcctgtgggaaggtctggtgtctctggattttcgctcactgtacccgtcgattatcattacgcataacgtgtccccggacaccctgaatcgtgaaggctgcatggaatatgatgttgctccggaagtcaaacacaagttttgtaaagactttccgggtttcattccgtcactgctgaaacgtctgctggatgaacgccaggaaatcaaacgtcgcatgaaagcctcgaaggatccgattgaaaagaaaatgctggactatcgtcaacgcgcaatcaaaattctggctaatagctattacggctattacggttatgcgaaggcccgctggtactgcaaagaatgtgcggaatctgtcacggcctggggccgtgaatatatcgaatttgtgcgcaaagaactggaagaaaagttcggtttcaaggttctgtacattgatacggacggcctgtacgcaaccatcccgggtgctaaaccggaagaaattaagcgtaaggccctggaatttgtggaatacatcaacgcaaaactgccgggcctgctggaactggaatatgaaggcttctacgttcgcggctttttcgtcacgaagaaaaagtatgcgctgattgacgaagaaggcaaaatcattacccgtggtctggaaatcgttcgtcgcgattggagtgaaattgccaaagaaacccaggcacgtgttctggaagcactgctgaaagatggtaatgtcgaagaagcagtgagtattgttaaagaagtcacggaaaaactgtccaagtatgaagtcccgccggaaaaactggtgattcatgaacaaatcacccgcgaactgaaagattacaaggcgacgggcccgcacgtggcaattgctaaacgtctggcagcgcgtggcgttaagatccgtccgggtaccgttattagctatatcgtcctgaaaggctctggtcgtattggtgaccgcgccatcccgtttgatgaattcgacccggctaaacaccgctacgatgcggaatattacattgaaaatcaggtcctgccggctgtggaacgtatcctgaaagcgtttggctatcgtaaggaagatctgcgctaccagaaaacccgtcaagtgggcctgggtgcgtggctgaaaccgaagggtaaaaagtaa

SEQ ID NO: 249 - DNA, 2331 bp, Artificial Sequence
  Synthetic
atgattctggacgctgactatattacggaaaatggcaagccggttgtgcgcatcttcaaaaaggaaaatggcgaattcaaggtggaatatgatcgcaactttgaaccgtatatttacgccctgctgaaagatgacagtgcaatcgaagaaattaaaaagatcaccgccgaacgccatggcaccgtggttcgtatcacgaaagcagaaaaggttgaacgtaaatttctgggtcgcccggtggaagtttggaaactgtatttcacgcatccgcaggatgtgccggccattcgtgacaaaatccgctctcacccggcagtcgtggatatttatgaatacgacatcccgtttgccaaacgttatctgattgataagggcctggttccgatggaaggtgacgaagaactgaaaatgctggcttttgatatcgaaaccctgtatcacgaaggcgaagaattcgcggaaggtccgattctgatgatctcatacgcagacgaatcggaagctcgcgtgattacctggaaaaaggttgatctgccgtatgttgacgctgtcagcacggaaaaagatatgattaaggcgtttctgcgtgttgtcaaagaaaaggatccggacgttctgatcacctataacggcgataattttgacttcgcttacctgaaaaagcgctgcgaaaaactgggtgtgaagttcattctgggccgtgacggttctgaaccgaaaatccagcgtatgggcgatcgctttgcagtcgacgtgaaaggtcgcattcatttcgatctgtatccggtgattcgtcgcaccatcaacctgccgacctatacgctggaagcggtctacgaagccatttttggccgtccgaaagaaaaggtgtatgccgaagaaatcgcacaagcttgggaaaccaatgaaggcctggaacgtgtcgctcgctatagcatggaagatgcgaaagtgacgtacgaactgggcaaggaatttttcccgatggaagcgcagctgtcacgcctgattggccaaccgctgtgggatgtgtcgcgtagctctaccggtaacctggttgaatggttcctgctgcgtaaagcgtatgaacgcaacgaactggcaccgaataaaccggatgaacgtgaatatgaacgtcgcctgcgcgaatcttatgccggcggttacgttaaggaaccggaaaaaggcctgtgggaaggtctggtgtctctggattttcgctcactgtacccgtcgattatcattacgcataacgtgtccccggacaccctgaatcgtgaaggctgcatggaatatgatgttgctccggaagtcaaacacaagttttgtaaagactttccgggtttcattccgtcactgctgaaacgtctgctggatgaacgccaggaaatcaaacgtcgcatgaaagcctcgaaggatccgattgaaaagaaaatgctggactatcgtcaacgcgcaatcaaaattctggctaatagctattacggctattacggttatgcgaaggcccgctggtactgcaaagaatgtgcggaatctgtcacggcctggggccgtgaatatatcgaatttgtgcgcaaagaactggaagaaaagttcggtttcaaggttctgtacattgatacggacggcctgtacgcaaccatcccgggtgctaaaccggaagaaattaagcgtaaggccctggaatttgtggaatacatcaacgcaaaactgccgggcctgctggaactggaatatgaaggcttctacgttcgcggctttttcgtcacgaagaaaaagtatgcgctgattgacgaagaaggcaaaatcattacccgtggtctggaaatcgttcgtcgcgattggagtgaaattgccaaagaaacccaggcacgcgtcctggaagcaatcctgaaagatggtgacgtggaagaagccgtccgtattgtgaaagaagttacggaaaaactgtccaaatatgaagttccgccggaaaaactggtcatccatgaacaaattacccgcgaactgaaagattacaaagcgacgggcccgcacgtcgcaatcgctaaacgtctggcggcgcgtggcgtgaaaattcgtccgggtaccgtgatctcatatattgttctgaaaggctcgggtcgtatcggtgaccgcgctattccgtttgatgaattcgacccgaaaaaacacaaatacgatgcggaatactacatcgaaaaccaggttctgccggccgtcgaacgtattctgcgcgcatttggctaccgtaaagaagatctgcgttatcaaaaaaccaaacaagtgggtctgggtgcgtggctgaaaccgaaaggtaaaaaataa

SEQ ID NO: 250 - DNA, 2328 bp, Artificial Sequence
  Synthetic
atgattctggacgctgactatattacggaaaatggcaagccggttgtgcgcatcttcaaaaaggaaaatggcgaattcaaggtggaatatgatcgcaactttgaaccgtatatttacgccctgctgaaagatgacagtgcaatcgaagaaattaaaaagatcaccgccgaacgccatggcaccgtggttcgtatcacgaaagcagaaaaggttgaacgtaaatttctgggtcgcccggtggaagtttggaaactgtatttcacgcatccgcaggatgtgccggccattcgtgacaaaatccgctctcacccggcagtcgtggatatttatgaatacgacatcccgtttgccaaacgttatctgattgataagggcctggttccgatggaaggtgacgaagaactgaaaatgctggcttttgatatcgaaaccctgtatcacgaaggcgaagaattcgcggaaggtccgattctgatgatctcatacgcagacgaatcggaagctcgcgtgattacctggaaaaaggttgatctgccgtatgttgacgctgtcagcacggaaaaagatatgattaaggcgtttctgcgtgttgtcaaagaaaaggatccggacgttctgatcacctataacggcgataattttgacttcgcttacctgaaaaagcgctgcgaaaaactgggtgtgaagttcattctgggccgtgacggttctgaaccgaaaatccagcgtatgggcgatcgctttgcagtcgacgtgaaaggtcgcattcatttcgatctgtatccggtgattcgtcgcaccatcaacctgccgacctatacgctggaagcggtctacgaagccatttttggccgtccgaaagaaaaggtgtatgccgaagaaatcgcacaagcttgggaaaccaatgaaggcctggaacgtgtcgctcgctatagcatggaagatgcgaaagtgacgtacgaactgggcaaggaatttttcccgatggaagcgcagctgtcacgcctgattggccaaccgctgtgggatgtgtcgcgtagctctaccggtaacctggttgaatggttcctgctgcgtaaagcgtatgaacgcaacgaactggcaccgaataaaccggatgaacgtgaatatgaacgtcgcctgcgcgaatcttatgccggcggttacgttaaggaaccggaaaaaggcctgtgggaaggtctggtgtctctggattttcgctcactgtacccgtcgattatcattacgcataacgtgtccccggacaccctgaatcgtgaaggctgcatggaatatgatgttgctccggaagtcaaacacaagttttgtaaagactttccgggtttcattccgtcactgctgaaacgtctgctggatgaacgccaggaaatcaaacgtcgcatgaaagcctcgaaggatccgattgaaaagaaaatgctggactatcgtcaacgcgcaatcaaaattctggctaatagctattacggctattacggttatgcgaaggcccgctggtactgcaaagaatgtgcggaatctgtcacggcctggggccgtgaatatatcgaatttgtgcgcaaagaactggaagaaaagttcggtttcaaggttctgtacattgatacggacggcctgtacgcaaccatcccgggtgctaaaccggaagaaattaagcgtaaggccctggaatttgtggaatacatcaacgcaaaactgccgggcctgctggaactggaatatgaaggcttctacgttcgcggctttttcgtcacgaagaaaaagtatgcgctgattgacgaagaaggcaaaatcattacccgtggtctggaaatcgttcgtcgcgattggagtgaaattgccaaagaaacccaggcacgtgttctggaagcaattctgaaacatggtaacgtcgaagaagcggtcaaaatcgtgaaagaagttacggaaaaactgtctaactacgaaattccgccggaaaaactggccatctacgaacaaattacccgcccgctgcatgaatataaagcaatcggtccgcacgtcgcagtggcaaaacgtctggcagcacgcggcgttaaagtcaaaccgggtatggtcatcggctatattgtgctgcgtggtgatggcccgatcagcaaccgcgcaattctggctgaagaatacgatctgaaaaaacacaaatacgacgccgaatattacatcgaaaatcaggttctgccggctgtcctgcgtattctggaagcgtttggctatcgtaaagaagatctgcgctggcagaaaacccgtcaaacgggtctgacctcatggctgaatattaaaaaatcgtaa

SEQ ID NO: 251 - DNA, 2328 bp, Artificial Sequence
  Synthetic
atgattctggacgctgactatattacggaaaatggcaagccggttgtgcgcatcttcaaaaaggaaaatggcgaattcaaggtggaatatgatcgcaactttgaaccgtatatttacgccctgctgaaagatgacagtgcaatcgaagaaattaaaaagatcaccgccgaacgccatggcaccgtggttcgtatcacgaaagcagaaaaggttgaacgtaaatttctgggtcgcccggtggaagtttggaaactgtatttcacgcatccgcaggatgtgccggccattcgtgacaaaatccgctctcacccggcagtcgtggatatttatgaatacgacatcccgtttgccaaacgttatctgattgataagggcctggttccgatggaaggtgacgaagaactgaaaatgctggcttttgatatcgaaaccctgtatcacgaaggcgaagaattcgcggaaggtccgattctgatgatctcatacgcagacgaatcggaagctcgcgtgattacctggaaaaaggttgatctgccgtatgttgacgctgtcagcacggaaaaagatatgattaaggcgtttctgcgtgttgtcaaagaaaaggatccggacgttctgatcacctataacggcgataattttgacttcgcttacctgaaaaagcgctgcgaaaaactgggtgtgaagttcattctgggccgtgacggttctgaaccgaaaatccagcgtatgggcgatcgctttgcagtcgacgtgaaaggtcgcattcatttcgatctgtatccggtgattcgtcgcaccatcaacctgccgacctatacgctggaagcggtctacgaagccatttttggccgtccgaaagaaaaggtgtatgccgaagaaatcgcacaagcttgggaaaccaatgaaggcctggaacgtgtcgctcgctatagcatggaagatgcgaaagtgacgtacgaactgggcaaggaatttttcccgatggaagcgcagctgtcacgcctgattggccaaccgctgtgggatgtgtcgcgtagctctaccggtaacctggttgaatggttcctgctgcgtaaagcgtatgaacgcaacgaactggcaccgaataaaccggatgaacgtgaatatgaacgtcgcctgcgcgaatcttatgccggcggttacgttaaggaaccggaaaaaggcctgtgggaaggtctggtgtctctggattttcgctcactgtacccgtcgattatcattacgcataacgtgtccccggacaccctgaatcgtgaaggctgcatggaatatgatgttgctccggaagtcaaacacaagttttgtaaagactttccgggtttcattccgtcactgctgaaacgtctgctggatgaacgccaggaaatcaaacgtcgcatgaaagcctcgaaggatccgattgaaaagaaaatgctggactatcgtcaacgcgcaatcaaaattctggctaatagctattacggctattacggttatgcgaaggcccgctggtactgcaaagaatgtgcggaatctgtcacggcctggggccgtgaatatatcgaatttgtgcgcaaagaactggaagaaaagttcggtttcaaggttctgtacattgatacggacggcctgtacgcaaccatcccgggtgctaaaccggaagaaattaagcgtaaggccctggaatttgtggaatacatcaacgcaaaactgccgggcctgctggaactggaatatgaaggcttctacgttcgcggctttttcgtcacgaagaaaaagtatgcgctgattgacgaagaaggcaaaatcattacccgtggtctggaaatcgttcgtcgcgattggagtgaaattgccaaagaaacccaggcaaaagttctggaagcaatcctgaaacatggtaatgtcgaagaagcagtgaaaattgtcaaggaagtgacggaaaaactgtcgaagtatgaaatcccgccggaaaaactggtgatctacgaacaaattacccgcccgctgcatgaatataaagcgattggcccgcacgtggcagttgctaaacgtctggcagcccgcggtgtcaaagtgcgtccgggcatggtgatcggttatattgttctgcgtggcgatggtccgatcagtaaacgcgcgattctggccgaagaatttgatccgcgcaaacacaagtacgacgccgaatattacatcgaaaaccaggtgctgccggctgttctgcgtattctggaagcgttcggctatcgtaaagaagatctgcgctggcagaaaaccaagcaaacgggtctgaccgcatggctgaatgtgaaaaagaaataa

SEQ ID NO: 252 - DNA, 2331 bp, Artificial Sequence
  Synthetic
atgattctggacgctgactatattacggaaaatggcaagccggttgtgcgcatcttcaaaaaggaaaatggcgaattcaaggtggaatatgatcgcaactttgaaccgtatatttacgccctgctgaaagatgacagtgcaatcgaagaaattaaaaagatcaccgccgaacgccatggcaccgtggttcgtatcacgaaagcagaaaaggttgaacgtaaatttctgggtcgcccggtggaagtttggaaactgtatttcacgcatccgcaggatgtgccggccattcgtgacaaaatccgctctcacccggcagtcgtggatatttatgaatacgacatcccgtttgccaaacgttatctgattgataagggcctggttccgatggaaggtgacgaagaactgaaaatgctggcttttgatatcgaaaccctgtatcacgaaggcgaagaattcgcggaaggtccgattctgatgatctcatacgcagacgaatcggaagctcgcgtgattacctggaaaaaggttgatctgccgtatgttgacgctgtcagcacggaaaaagatatgattaaggcgtttctgcgtgttgtcaaagaaaaggatccggacgttctgatcacctataacggcgataattttgacttcgcttacctgaaaaagcgctgcgaaaaactgggtgtgaagttcattctgggccgtgacggttctgaaccgaaaatccagcgtatgggcgatcgctttgcagtcgacgtgaaaggtcgcattcatttcgatctgtatccggtgattcgtcgcaccatcaacctgccgacctatacgctggaagcggtctacgaagccatttttggccgtccgaaagaaaaggtgtatgccgaagaaatcgcacaagcttgggaaaccaatgaaggcctggaacgtgtcgctcgctatagcatggaagatgcgaaagtgacgtacgaactgggcaaggaatttttcccgatggaagcgcagctgtcacgcctgattggccaaccgctgtgggatgtgtcgcgtagctctaccggtaacctggttgaatggttcctgctgcgtaaagcgtatgaacgcaacgaagtggcaccgaataaaccggatgaacgtgaatatcagcgtcgcctgcgcgaaagttatgcaggcggttacgtgaaagaaccggaaaaaggtctgtgggaaggcctggtttatctggattttcgtgcgctgtacccgagcattatcattacgcataacgtttctccggacaccctgaatcgtgaaggctgccgcgaatatgatattgcgccggaagtgggtcacaaattttgtaaagatatcccgggcttcattccgagcctgctgaaacgtctgctggaagaacgccagaaaatcaaaacgaaaatgaaagaaacccaagatccgatcgaaaaaattctgctggactaccgtcagcgcgcgatcaaaattctggccaacagttattacggttattacggctatgcaaaagctcgctggtactgcaaagaatgtgcagaatccgttaccgcttggggtcgtaaatacatcgaattcgtctggaaagaactggaagaaaaattcggtttcaaagttctgtacatcgatacggacggtctgtacgcaaccatcccgggcggtaaaccggaagaaattaagaaaaaagccctggaatttgtggattacattaatgcaaaactgccgggcctgctggaactggaatatgaaggtttctacgtgcgtggctttttcgttaccaagaaaaaatatgccgtcattgacgaagaaggtaaagtgatcacccgcggcctggaaattgttcgtcgcgattggagtgaaattgccaaagaaacccaggcacgcgttctggaagcaatcctgcgtcatggtgacgtcgaagaagccgttcgcattgtcaaagatgtgacggaaaagctgtcgaaatatgaagtcccgccggaaaaactggtgatccatgaacaaattacccgtgaactgaaggattacaaagcgacgggcccgcacgttgcaattgctaaacgcctggcagcccgtggcatcaagattcgtccgggtaccgttatcagctatattgtcctgaaaggctctggtcgcatcggtgatcgtgctattccgtttgatgaattcgacccgacgaaacaccgttacgatgccgaatattacatcgaaaatcaggtgctgccggccgttgaacgcattctgaaagcatttggctataagaaagaagaactgcgctaccagaaaacccgtcaagtgggcctgggtgcgtggctgaagctgaaaggtaagaaataa

SEQ ID NO: 253 - DNA, 2325 bp, Artificial Sequence
  Synthetic
atgattctggacgctgactatattacggaaaatggcaagccggttgtgcgcatcttcaaaaaggaaaatggcgaattcaaggtggaatatgatcgcaactttgaaccgtatatttacgccctgctgaaagatgacagtgcaatcgaagaaattaaaaagatcaccgccgaacgccatggcaccgtggttcgtatcacgaaagcagaaaaggttgaacgtaaatttctgggtcgcccggtggaagtttggaaactgtatttcacgcatccgcaggatgtgccggccattcgtgacaaaatccgctctcacccggcagtcgtggatatttatgaatacgacatcccgtttgccaaacgttatctgattgataagggcctggttccgatggaaggtgacgaagaactgaaaatgctggcttttgatatcgaaaccctgtatcacgaaggcgaagaattcgcggaaggtccgattctgatgatctcatacgcagacgaatcggaagctcgcgtgattacctggaaaaaggttgatctgccgtatgttgacgctgtcagcacggaaaaagatatgattaaggcgtttctgcgtgttgtcaaagaaaaggatccggacgttctgatcacctataacggcgataattttgacttcgcttacctgaaaaagcgctgcgaaaaactgggtgtgaagttcattctgggccgtgacggttctgaaccgaaaatccagcgtatgggcgatcgctttgcagtcgacgtgaaaggtcgcattcatttcgatctgtatccggtgattcgtcgcaccatcaacctgccgacctatacgctggaagcggtctacgaagccatttttggccgtccgaaagaaaaggtgtatgccgaagaaatcgcacaagcttgggaaaccaatgaaggcctggaacgtgtcgctcgctatagcatggaagatgcgaaagtgacgtacgaactgggcaaggaatttttcccgatggaagcgcagctgtcacgcctgattggccaaccgctgtgggatgtgtcgcgtagctctaccggtaacctggttgaatggttcctgctgcgtaaagcgtatgaacgcaacgaagtggcaccgaataaaccggatgaacgtgaatatcagcgtcgcctgcgcgaaagttatgcaggcggttacgtgaaagaaccggaaaaaggtctgtgggaaggcctggtttatctggattttcgtgcgctgtacccgagcattatcattacgcataacgtttctccggacaccctgaatcgtgaaggctgccgcgaatatgatattgcgccggaagtgggtcacaaattttgtaaagatatcccgggcttcattccgagcctgctgaaacgtctgctggaagaacgccagaaaatcaaaacgaaaatgaaagaaacccaagatccgatcgaaaaaattctgctggactaccgtcagcgcgcgatcaaaattctggccaacagttattacggttattacggctatgcaaaagctcgctggtactgcaaagaatgtgcagaatccgttaccgcttggggtcgtaaatacatcgaattcgtctggaaagaactggaagaaaaattcggtttcaaagttctgtacatcgatacggacggtctgtacgcaaccatcccgggcggtaaaccggaagaaattaagaaaaaagccctggaatttgtggattacattaatgcaaaactgccgggcctgctggaactggaatatgaaggtttctacgtgcgtggctttttcgttaccaagaaaaaatatgccgtcattgacgaagaaggtaaagtgatcacccgcggcctggaaattgttcgtcgcgattggagtgaaattgccaaagaaacccaggcacgtgtcctggaagcaatcctgaaacatggtgatgtggaagaagcggttcgcattgtcaaagaagtgacggaaaagctgtcgaaatatgaagttccgccggaaaaactggtcatccatgaacaaattacccgcgatctgcgtgactacaaagccacgggtccgcacgtggcagttgcaaaacgtctggcagcccgtggcgtgaagattcgtccgggtaccgtgatcagttatattgttctgaaaggctccggtcgcatcggtgaccgtgctattccgtttgatgaattcgacccgacgaaacaccgttacgatgccgaatattacatcgaaaatcaggtcctgccggccgtggaacgcattctgaaagcatttggttatcgcaaggaagatctgcgttaccagaagaccaaacaagtcggcctgggtgcgtggctgaaagtgaaaaagtaa

SEQ ID NO: 254 - DNA, 2331 bp, Artificial Sequence
  Synthetic
atgattctggacgctgactatattacggaaaatggcaagccggttgtgcgcatcttcaaaaaggaaaatggcgaattcaaggtggaatatgatcgcaactttgaaccgtatatttacgccctgctgaaagatgacagtgcaatcgaagaaattaaaaagatcaccgccgaacgccatggcaccgtggttcgtatcacgaaagcagaaaaggttgaacgtaaatttctgggtcgcccggtggaagtttggaaactgtatttcacgcatccgcaggatgtgccggccattcgtgacaaaatccgctctcacccggcagtcgtggatatttatgaatacgacatcccgtttgccaaacgttatctgattgataagggcctggttccgatggaaggtgacgaagaactgaaaatgctggcttttgatatcgaaaccctgtatcacgaaggcgaagaattcgcggaaggtccgattctgatgatctcatacgcagacgaatcggaagctcgcgtgattacctggaaaaaggttgatctgccgtatgttgacgctgtcagcacggaaaaagatatgattaaggcgtttctgcgtgttgtcaaagaaaaggatccggacgttctgatcacctataacggcgataattttgacttcgcttacctgaaaaagcgctgcgaaaaactgggtgtgaagttcattctgggccgtgacggttctgaaccgaaaatccagcgtatgggcgatcgctttgcagtcgacgtgaaaggtcgcattcatttcgatctgtatccggtgattcgtcgcaccatcaacctgccgacctatacgctggaagcggtctacgaagccatttttggccgtccgaaagaaaaggtgtatgccgaagaaatcgcacaagcttgggaaaccaatgaaggcctggaacgtgtcgctcgctatagcatggaagatgcgaaagtgacgtacgaactgggcaaggaatttttcccgatggaagcgcagctgtcacgcctgattggccaaccgctgtgggatgtgtcgcgtagctctaccggtaacctggttgaatggttcctgctgcgtaaagcgtatgaacgcaacgaagtggcaccgaataaaccggatgaacgtgaatatcagcgtcgcctgcgcgaaagttatgcaggcggttacgtgaaagaaccggaaaaaggtctgtgggaaggcctggtttatctggattttcgtgcgctgtacccgagcattatcattacgcataacgtttctccggacaccctgaatcgtgaaggctgccgcgaatatgatattgcgccggaagtgggtcacaaattttgtaaagatatcccgggcttcattccgagcctgctgaaacgtctgctggaagaacgccagaaaatcaaaacgaaaatgaaagaaacccaagatccgatcgaaaaaattctgctggactaccgtcagcgcgcgatcaaaattctggccaacagttattacggttattacggctatgcaaaagctcgctggtactgcaaagaatgtgcagaatccgttaccgcttggggtcgtaaatacatcgaattcgtctggaaagaactggaagaaaaattcggtttcaaagttctgtacatcgatacggacggtctgtacgcaaccatcccgggcggtaaaccggaagaaattaagaaaaaagccctggaatttgtggattacattaatgcaaaactgccgggcctgctggaactggaatatgaaggtttctacgtgcgtggctttttcgttaccaagaaaaaatatgccgtcattgacgaagaaggtaaagtgatcacccgcggcctggaaattgttcgtcgcgattggagtgaaattgccaaagaaacccaggcacgtgtgctggaagctctgctgaaagatggcaatgttgaagaagcggtttccattgtcaaagaagtgacggaaaagctgggtaaatatgaagtcccgccggaaaaactggtgatccatgaacaaattacccgcgaactgaaggattacaaagcgacgggcccgcacgttgctatcgcgaaacgtctggcagcgcgtggcgtgaagattcgtccgggtaccgttatcagctatattgtcctgaaaggctctggtcgtatcggtgaccgcgcgattccgtttgatgaattcgacccgacgaaacatcgctacgatgcagaatattacatcgaaaaccaggttctgccggctgtcgaacgtattctgaaagcgtttggctatcgtgccgaagatctgcgctaccagaaaacccgtcaagtgggcctgggtgtttggctgcaaccgaaaggtaagaaataa

SEQ ID NO: 255 - DNA, 2328 bp, Artificial Sequence
  Synthetic
atgattctggacgctgactatattacggaaaatggcaagccggttgtgcgcatcttcaaaaaggaaaatggcgaattcaaggtggaatatgatcgcaactttgaaccgtatatttacgccctgctgaaagatgacagtgcaatcgaagaaattaaaaagatcaccgccgaacgccatggcaccgtggttcgtatcacgaaagcagaaaaggttgaacgtaaatttctgggtcgcccggtggaagtttggaaactgtatttcacgcatccgcaggatgtgccggccattcgtgacaaaatccgctctcacccggcagtcgtggatatttatgaatacgacatcccgtttgccaaacgttatctgattgataagggcctggttccgatggaaggtgacgaagaactgaaaatgctggcttttgatatcgaaaccctgtatcacgaaggcgaagaattcgcggaaggtccgattctgatgatctcatacgcagacgaatcggaagctcgcgtgattacctggaaaaaggttgatctgccgtatgttgacgctgtcagcacggaaaaagatatgattaaggcgtttctgcgtgttgtcaaagaaaaggatccggacgttctgatcacctataacggcgataattttgacttcgcttacctgaaaaagcgctgcgaaaaactgggtgtgaagttcattctgggccgtgacggttctgaaccgaaaatccagcgtatgggcgatcgctttgcagtcgacgtgaaaggtcgcattcatttcgatctgtatccggtgattcgtcgcaccatcaacctgccgacctatacgctggaagcggtctacgaagccatttttggccgtccgaaagaaaaggtgtatgccgaagaaatcgcacaagcttgggaaaccaatgaaggcctggaacgtgtcgctcgctatagcatggaagatgcgaaagtgacgtacgaactgggcaaggaatttttcccgatggaagcgcagctgtcacgcctgattggccaaccgctgtgggatgtgtcgcgtagctctaccggtaacctggttgaatggttcctgctgcgtaaagcgtatgaacgcaacgaagtggcaccgaataaaccggatgaacgtgaatatcagcgtcgcctgcgcgaaagttatgcaggcggttacgtgaaagaaccggaaaaaggtctgtgggaaggcctggtttatctggattttcgtgcgctgtacccgagcattatcattacgcataacgtttctccggacaccctgaatcgtgaaggctgccgcgaatatgatattgcgccggaagtgggtcacaaattttgtaaagatatcccgggcttcattccgagcctgctgaaacgtctgctggaagaacgccagaaaatcaaaacgaaaatgaaagaaacccaagatccgatcgaaaaaattctgctggactaccgtcagcgcgcgatcaaaattctggccaacagttattacggttattacggctatgcaaaagctcgctggtactgcaaagaatgtgcagaatccgttaccgcttggggtcgtaaatacatcgaattcgtctggaaagaactggaagaaaaattcggtttcaaagttctgtacatcgatacggacggtctgtacgcaaccatcccgggcggtaaaccggaagaaattaagaaaaaagccctggaatttgtggattacattaatgcaaaactgccgggcctgctggaactggaatatgaaggtttctacgtgcgtggctttttcgttaccaagaaaaaatatgccgtcattgacgaagaaggtaaagtgatcacccgcggcctggaaattgttcgtcgcgattggagtgaaattgccaaagaaacccaggcaaaggttctggaagcaattctgaaacatggtaacgtcgaagaagcggtcaagatcgtgaaagaagttaccgaaaaactgtcgaattatgaaattccggtcgaaaagctggtgatctacgaacaaattacgcgcccgctgaacgaatataaagccattggcccgcacgtggcagttgctaaacgtctggcggccaagggtatcaagattaaaccgggcatggtgattggttatgttgtcctgcgcggcgatggtccgatcagcaaacgtgcgatcgccatcgaagaattcgatggcaaaaagcataagtacgacgcagaatactacatcgaaaatcaggttctgccggccgtcgaacgtatcctgaaagcattcggttataagcgtgaagatctgcgctggcagaagaccaaacaagtgggcctgggtgcgtggctgaaagttaaaaagtcttaa

SEQ ID NO: 256 - DNA, 2331 bp, Artificial Sequence
  Synthetic
atgattctggacgctgactatattacggaaaatggcaagccggttgtgcgcatcttcaaaaaggaaaatggcgaattcaaggtggaatatgatcgcaactttgaaccgtatatttacgccctgctgaaagatgacagtgcaatcgaagaaattaaaaagatcaccgccgaacgccatggcaccgtggttcgtatcacgaaagcagaaaaggttgaacgtaaatttctgggtcgcccggtggaagtttggaaactgtatttcacgcatccgcaggatgtgccggccattcgtgacaaaatccgctctcacccggcagtcgtggatatttatgaatacgacatcccgtttgccaaacgttatctgattgataagggcctggttccgatggaaggtgacgaagaactgaaaatgctggcttttgatatcgaaaccctgtatcacgaaggcgaagaattcgcggaaggtccgattctgatgatctcatacgcagacgaatcggaagctcgcgtgattacctggaaaaaggttgatctgccgtatgttgacgctgtcagcacggaaaaagatatgattaaggcgtttctgcgtgttgtcaaagaaaaggatccggacgttctgatcacctataacggcgataattttgacttcgcttacctgaaaaagcgctgcgaaaaactgggtgtgaagttcattctgggccgtgacggttctgaaccgaaaatccagcgtatgggcgatcgctttgcagtcgacgtgaaaggtcgcattcatttcgatctgtatccggtgattcgtcgcaccatcaacctgccgacctatacgctggaagcggtctacgaagccatttttggccgtccgaaagaaaaggtgtatgccgaagaaatcgcacaagcttgggaaaccaatgaaggcctggaacgtgtcgctcgctatagcatggaagatgcgaaagtgacgtacgaactgggcaaggaatttttcccgatggaagcgcagctgtcacgcctgattggccaaccgctgtgggatgtgtcgcgtagctctaccggtaacctggttgaatggttcctgctgcgtaaagcgtatgaacgcaacgaagtggcaccgaataaaccggatgaacgtgaatatcagcgtcgcctgcgcgaaagttatgcaggcggttacgtgaaagaaccggaaaaaggtctgtgggaaggcctggtttatctggattttcgtgcgctgtacccgagcattatcattacgcataacgtttctccggacaccctgaatcgtgaaggctgccgcgaatatgatattgcgccggaagtgggtcacaaattttgtaaagatatcccgggcttcattccgagcctgctgaaacgtctgctggaagaacgccagaaaatcaaaacgaaaatgaaagaaacccaagatccgatcgaaaaaattctgctggactaccgtcagcgcgcgatcaaaattctggccaacagttattacggttattacggctatgcaaaagctcgctggtactgcaaagaatgtgcagaatccgttaccgcttggggtcgtaaatacatcgaattcgtctggaaagaactggaagaaaaattcggtttcaaagttctgtacatcgatacggacggtctgtacgcaaccatcccgggcggtaaaccggaagaaattaagaaaaaagccctggaatttgtggattacattaatgcaaaactgccgggcctgctggaactggaatatgaaggtttctacgtgcgtggctttttcgttaccaagaaaaaatatgccgtcattgacgaagaaggtaaagtgatcacccgcggcctggaaattgttcgtcgcgattggagtgaaattgccaaagaaacccaggcacgtgttctggaagcactgctgaaagatggtaatgtcgaagaagcagtgagtattgttaaagaagtcacggaaaaactgtccaagtatgaagtcccgccggaaaaactggtgattcatgaacaaatcacccgcgaactgaaagattacaaggcgacgggcccgcacgtggcaattgctaaacgtctggcagcgcgtggcgttaagatccgtccgggtaccgttattagctatatcgtcctgaaaggctctggtcgtattggtgaccgcgccatcccgtttgatgaattcgacccggctaaacaccgctacgatgcggaatattacattgaaaatcaggtcctgccggctgtggaacgtatcctgaaagcgtttggctatcgtaaggaagatctgcgctaccagaaaacccgtcaagtgggcctgggtgcgtggctgaaaccgaagggtaaaaagtaa

SEQ ID NO: 257 - DNA, 2331 bp, Artificial Sequence
  Synthetic
atgattctggacgctgactatattacggaaaatggcaagccggttgtgcgcatcttcaaaaaggaaaatggcgaattcaaggtggaatatgatcgcaactttgaaccgtatatttacgccctgctgaaagatgacagtgcaatcgaagaaattaaaaagatcaccgccgaacgccatggcaccgtggttcgtatcacgaaagcagaaaaggttgaacgtaaatttctgggtcgcccggtggaagtttggaaactgtatttcacgcatccgcaggatgtgccggccattcgtgacaaaatccgctctcacccggcagtcgtggatatttatgaatacgacatcccgtttgccaaacgttatctgattgataagggcctggttccgatggaaggtgacgaagaactgaaaatgctggcttttgatatcgaaaccctgtatcacgaaggcgaagaattcgcggaaggtccgattctgatgatctcatacgcagacgaatcggaagctcgcgtgattacctggaaaaaggttgatctgccgtatgttgacgctgtcagcacggaaaaagatatgattaaggcgtttctgcgtgttgtcaaagaaaaggatccggacgttctgatcacctataacggcgataattttgacttcgcttacctgaaaaagcgctgcgaaaaactgggtgtgaagttcattctgggccgtgacggttctgaaccgaaaatccagcgtatgggcgatcgctttgcagtcgacgtgaaaggtcgcattcatttcgatctgtatccggtgattcgtcgcaccatcaacctgccgacctatacgctggaagcggtctacgaagccatttttggccgtccgaaagaaaaggtgtatgccgaagaaatcgcacaagcttgggaaaccaatgaaggcctggaacgtgtcgctcgctatagcatggaagatgcgaaagtgacgtacgaactgggcaaggaatttttcccgatggaagcgcagctgtcacgcctgattggccaaccgctgtgggatgtgtcgcgtagctctaccggtaacctggttgaatggttcctgctgcgtaaagcgtatgaacgcaacgaagtggcaccgaataaaccggatgaacgtgaatatcagcgtcgcctgcgcgaaagttatgcaggcggttacgtgaaagaaccggaaaaaggtctgtgggaaggcctggtttatctggattttcgtgcgctgtacccgagcattatcattacgcataacgtttctccggacaccctgaatcgtgaaggctgccgcgaatatgatattgcgccggaagtgggtcacaaattttgtaaagatatcccgggcttcattccgagcctgctgaaacgtctgctggaagaacgccagaaaatcaaaacgaaaatgaaagaaacccaagatccgatcgaaaaaattctgctggactaccgtcagcgcgcgatcaaaattctggccaacagttattacggttattacggctatgcaaaagctcgctggtactgcaaagaatgtgcagaatccgttaccgcttggggtcgtaaatacatcgaattcgtctggaaagaactggaagaaaaattcggtttcaaagttctgtacatcgatacggacggtctgtacgcaaccatcccgggcggtaaaccggaagaaattaagaaaaaagccctggaatttgtggattacattaatgcaaaactgccgggcctgctggaactggaatatgaaggtttctacgtgcgtggctttttcgttaccaagaaaaaatatgccgtcattgacgaagaaggtaaagtgatcacccgcggcctggaaattgttcgtcgcgattggagtgaaattgccaaagaaacccaggcacgcgtcctggaagcaatcctgaaagatggtgacgtggaagaagccgtccgtattgtgaaagaagttacggaaaaactgtccaaatatgaagttccgccggaaaaactggtcatccatgaacaaattacccgcgaactgaaagattacaaagcgacgggcccgcacgtcgcaatcgctaaacgtctggcggcgcgtggcgtgaaaattcgtccgggtaccgtgatctcatatattgttctgaaaggctcgggtcgtatcggtgaccgcgctattccgtttgatgaattcgacccgaaaaaacacaaatacgatgcggaatactacatcgaaaaccaggttctgccggccgtcgaacgtattctgcgcgcatttggctaccgtaaagaagatctgcgttatcaaaaaaccaaacaagtgggtctgggtgcgtggctgaaaccgaaaggtaaaaaataa

SEQ ID NO: 258 - DNA, 2328 bp, Artificial Sequence
  Synthetic
atgattctggacgctgactatattacggaaaatggcaagccggttgtgcgcatcttcaaaaaggaaaatggcgaattcaaggtggaatatgatcgcaactttgaaccgtatatttacgccctgctgaaagatgacagtgcaatcgaagaaattaaaaagatcaccgccgaacgccatggcaccgtggttcgtatcacgaaagcagaaaaggttgaacgtaaatttctgggtcgcccggtggaagtttggaaactgtatttcacgcatccgcaggatgtgccggccattcgtgacaaaatccgctctcacccggcagtcgtggatatttatgaatacgacatcccgtttgccaaacgttatctgattgataagggcctggttccgatggaaggtgacgaagaactgaaaatgctggcttttgatatcgaaaccctgtatcacgaaggcgaagaattcgcggaaggtccgattctgatgatctcatacgcagacgaatcggaagctcgcgtgattacctggaaaaaggttgatctgccgtatgttgacgctgtcagcacggaaaaagatatgattaaggcgtttctgcgtgttgtcaaagaaaaggatccggacgttctgatcacctataacggcgataattttgacttcgcttacctgaaaaagcgctgcgaaaaactgggtgtgaagttcattctgggccgtgacggttctgaaccgaaaatccagcgtatgggcgatcgctttgcagtcgacgtgaaaggtcgcattcatttcgatctgtatccggtgattcgtcgcaccatcaacctgccgacctatacgctggaagcggtctacgaagccatttttggccgtccgaaagaaaaggtgtatgccgaagaaatcgcacaagcttgggaaaccaatgaaggcctggaacgtgtcgctcgctatagcatggaagatgcgaaagtgacgtacgaactgggcaaggaatttttcccgatggaagcgcagctgtcacgcctgattggccaaccgctgtgggatgtgtcgcgtagctctaccggtaacctggttgaatggttcctgctgcgtaaagcgtatgaacgcaacgaagtggcaccgaataaaccggatgaacgtgaatatcagcgtcgcctgcgcgaaagttatgcaggcggttacgtgaaagaaccggaaaaaggtctgtgggaaggcctggtttatctggattttcgtgcgctgtacccgagcattatcattacgcataacgtttctccggacaccctgaatcgtgaaggctgccgcgaatatgatattgcgccggaagtgggtcacaaattttgtaaagatatcccgggcttcattccgagcctgctgaaacgtctgctggaagaacgccagaaaatcaaaacgaaaatgaaagaaacccaagatccgatcgaaaaaattctgctggactaccgtcagcgcgcgatcaaaattctggccaacagttattacggttattacggctatgcaaaagctcgctggtactgcaaagaatgtgcagaatccgttaccgcttggggtcgtaaatacatcgaattcgtctggaaagaactggaagaaaaattcggtttcaaagttctgtacatcgatacggacggtctgtacgcaaccatcccgggcggtaaaccggaagaaattaagaaaaaagccctggaatttgtggattacattaatgcaaaactgccgggcctgctggaactggaatatgaaggtttctacgtgcgtggctttttcgttaccaagaaaaaatatgccgtcattgacgaagaaggtaaagtgatcacccgcggcctggaaattgttcgtcgcgattggagtgaaattgccaaagaaacccaggcacgtgttctggaagcaattctgaaacatggtaacgtcgaagaagcggtcaaaatcgtgaaagaagttacggaaaaactgtctaactacgaaattccgccggaaaaactggccatctacgaacaaattacccgcccgctgcatgaatataaagcaatcggtccgcacgtcgcagtggcaaaacgtctggcagcacgcggcgttaaagtcaaaccgggtatggtcatcggctatattgtgctgcgtggtgatggcccgatcagcaaccgcgcaattctggctgaagaatacgatctgaaaaaacacaaatacgacgccgaatattacatcgaaaatcaggttctgccggctgtcctgcgtattctggaagcgtttggctatcgtaaagaagatctgcgctggcagaaaacccgtcaaacgggtctgacctcatggctgaatattaaaaaatcgtaa

SEQ ID NO: 259 - DNA, 2328 bp, Artificial Sequence
  Synthetic
atgattctggacgctgactatattacggaaaatggcaagccggttgtgcgcatcttcaaaaaggaaaatggcgaattcaaggtggaatatgatcgcaactttgaaccgtatatttacgccctgctgaaagatgacagtgcaatcgaagaaattaaaaagatcaccgccgaacgccatggcaccgtggttcgtatcacgaaagcagaaaaggttgaacgtaaatttctgggtcgcccggtggaagtttggaaactgtatttcacgcatccgcaggatgtgccggccattcgtgacaaaatccgctctcacccggcagtcgtggatatttatgaatacgacatcccgtttgccaaacgttatctgattgataagggcctggttccgatggaaggtgacgaagaactgaaaatgctggcttttgatatcgaaaccctgtatcacgaaggcgaagaattcgcggaaggtccgattctgatgatctcatacgcagacgaatcggaagctcgcgtgattacctggaaaaaggttgatctgccgtatgttgacgctgtcagcacggaaaaagatatgattaaggcgtttctgcgtgttgtcaaagaaaaggatccggacgttctgatcacctataacggcgataattttgacttcgcttacctgaaaaagcgctgcgaaaaactgggtgtgaagttcattctgggccgtgacggttctgaaccgaaaatccagcgtatgggcgatcgctttgcagtcgacgtgaaaggtcgcattcatttcgatctgtatccggtgattcgtcgcaccatcaacctgccgacctatacgctggaagcggtctacgaagccatttttggccgtccgaaagaaaaggtgtatgccgaagaaatcgcacaagcttgggaaaccaatgaaggcctggaacgtgtcgctcgctatagcatggaagatgcgaaagtgacgtacgaactgggcaaggaatttttcccgatggaagcgcagctgtcacgcctgattggccaaccgctgtgggatgtgtcgcgtagctctaccggtaacctggttgaatggttcctgctgcgtaaagcgtatgaacgcaacgaagtggcaccgaataaaccggatgaacgtgaatatcagcgtcgcctgcgcgaaagttatgcaggcggttacgtgaaagaaccggaaaaaggtctgtgggaaggcctggtttatctggattttcgtgcgctgtacccgagcattatcattacgcataacgtttctccggacaccctgaatcgtgaaggctgccgcgaatatgatattgcgccggaagtgggtcacaaattttgtaaagatatcccgggcttcattccgagcctgctgaaacgtctgctggaagaacgccagaaaatcaaaacgaaaatgaaagaaacccaagatccgatcgaaaaaattctgctggactaccgtcagcgcgcgatcaaaattctggccaacagttattacggttattacggctatgcaaaagctcgctggtactgcaaagaatgtgcagaatccgttaccgcttggggtcgtaaatacatcgaattcgtctggaaagaactggaagaaaaattcggtttcaaagttctgtacatcgatacggacggtctgtacgcaaccatcccgggcggtaaaccggaagaaattaagaaaaaagccctggaatttgtggattacattaatgcaaaactgccgggcctgctggaactggaatatgaaggtttctacgtgcgtggctttttcgttaccaagaaaaaatatgccgtcattgacgaagaaggtaaagtgatcacccgcggcctggaaattgttcgtcgcgattggagtgaaattgccaaagaaacccaggcaaaagttctggaagcaatcctgaaacatggtaatgtcgaagaagcagtgaaaattgtcaaggaagtgacggaaaaactgtcgaagtatgaaatcccgccggaaaaactggtgatctacgaacaaattacccgcccgctgcatgaatataaagcgattggcccgcacgtggcagttgctaaacgtctggcagcccgcggtgtcaaagtgcgtccgggcatggtgatcggttatattgttctgcgtggcgatggtccgatcagtaaacgcgcgattctggccgaagaatttgatccgcgcaaacacaagtacgacgccgaatattacatcgaaaaccaggtgctgccggctgttctgcgtattctggaagcgttcggctatcgtaaagaagatctgcgctggcagaaaaccaagcaaacgggtctgaccgcatggctgaatgtgaaaaagaaataa

SEQ ID NO: 260 - DNA, 2328 bp, Artificial Sequence
  Synthetic
atgattctggacgctgactatattacggaaaatggcaagccggttgtgcgcatcttcaaaaaggaaaatggcgaattcaaggtggaatatgatcgcaactttgaaccgtatatttacgccctgctgaaagatgacagtgcaatcgaagaaattaaaaagatcaccgccgaacgccatggcaccgtggttcgtatcacgaaagcagaaaaggttgaacgtaaatttctgggtcgcccggtggaagtttggaaactgtatttcacgcatccgcaggatgtgccggccattcgtgacaaaatccgctctcacccggcagtcgtggatatttatgaatacgacatcccgtttgccaaacgttatctgattgataagggcctggttccgatggaaggtgacgaagaactgaaaatgctggcttttgatatcgaaaccctgtatcacgaaggcgaagaattcgcggaaggtccgattctgatgatctcatacgcagacgaatcggaagctcgcgtgattacctggaaaaaggttgatctgccgtatgttgacgctgtcagcacggaaaaagatatgattaaggcgtttctgcgtgttgtcaaagaaaaggatccggacgttctgatcacctataacggcgataattttgacttcgcttacctgaaaaagcgctgcgaaaaactgggtgtgaagttcattctgggccgtgacggttctgaaccgaaaatccagcgtatgggcgatcgctttgcagtcgacgtgaaaggtcgcattcatttcgatctgtatccggtgattcgtcgcaccatcaacctgccgacctatacgctggaagcggtctacgaagccatttttggccgtccgaaagaaaaggtgtatgccgaagaaatcgcacaagcttgggaaaccaatgaaggcctggaacgtgtcgctcgctatagcatggaagatgcgaaagtgacgtacgaactgggcaaggaatttttcccgatggaagcgcagctgtcacgcctgattggccaaccgctgtgggatgtgtcgcgtagctctaccggtaacctggttgaatggttcctgctgcgtaaagcgtatgaacgcaacgaactggcgccgaataaaccggatgaaaaggaactggcacgtcgccgtggcggttatgcaggcggttacgtcaaagaaccggaacgtggcctgtgggataatattgtgtatctggactttcgcagtctgtacccgtccattatcattacccataacgttagtccggacacgctgaatcgcgaaggctgcaaagaatatgatgtggccccggaagttggtcacaagttctgtaaagactttccgggcttcatcccgtccctgctgggtgatctgctggaagaacgccagaagattaagcgtaagatgaaagcaaccgttgatccgctggaaaagaaactgctggactatcgccaacgtgcgatcaaaattctggccaacagctattacggctattacggttatgcgaaagcccgctggtactgccgtgaatgtgcagaatctgtgaccgcttggggccgcgaatatattgaaaccacgatccgtgaaatcgaagaaaagttcggtttcaaggttctgtacgctgataccgacggctttttcgcgacgatcccgggtgcagatgctgaaaccgtgaaaaagaaagctaaggaattcctgaagtacatcaacgcgaaactgccgggcctgctggaactggaatatgaaggcttctacgttcgtggctttttcgtcacgaagaaaaagtacgcggttatcgacgaagaaggcaaaattaccacgcgcggtctggaaatcgtgcgccgtgattggagtgaaattgccaaagaaacccaggcacgcgttctggaagcaatcctgcgtcatggtgacgtcgaagaagccgttcgcattgtcaaagatgtgacggaaaagctgtcgaaatatgaagtcccgccggaaaaactggtgatccatgaacaaattacccgtgaactgaaggattacaaagcgacgggcccgcacgttgcaattgctaaacgcctggcagcccgtggcatcaagattcgtccgggtaccgttatcagctatattgtcctgaaaggctctggtcgcatcggtgatcgtgctattccgtttgatgaattcgacccgacgaaacaccgttacgatgccgaatattacatcgaaaatcaggtgctgccggccgttgaacgcattctgaaagcatttggctataagaaagaagaactgcgctaccagaaaacccgtcaagtgggcctgggtgcgtggctgaagctgaaaggtaagaaataa

SEQ ID NO: 261 - DNA, 2322 bp, Artificial Sequence
  Synthetic
atgattctggacgctgactatattacggaaaatggcaagccggttgtgcgcatcttcaaaaaggaaaatggcgaattcaaggtggaatatgatcgcaactttgaaccgtatatttacgccctgctgaaagatgacagtgcaatcgaagaaattaaaaagatcaccgccgaacgccatggcaccgtggttcgtatcacgaaagcagaaaaggttgaacgtaaatttctgggtcgcccggtggaagtttggaaactgtatttcacgcatccgcaggatgtgccggccattcgtgacaaaatccgctctcacccggcagtcgtggatatttatgaatacgacatcccgtttgccaaacgttatctgattgataagggcctggttccgatggaaggtgacgaagaactgaaaatgctggcttttgatatcgaaaccctgtatcacgaaggcgaagaattcgcggaaggtccgattctgatgatctcatacgcagacgaatcggaagctcgcgtgattacctggaaaaaggttgatctgccgtatgttgacgctgtcagcacggaaaaagatatgattaaggcgtttctgcgtgttgtcaaagaaaaggatccggacgttctgatcacctataacggcgataattttgacttcgcttacctgaaaaagcgctgcgaaaaactgggtgtgaagttcattctgggccgtgacggttctgaaccgaaaatccagcgtatgggcgatcgctttgcagtcgacgtgaaaggtcgcattcatttcgatctgtatccggtgattcgtcgcaccatcaacctgccgacctatacgctggaagcggtctacgaagccatttttggccgtccgaaagaaaaggtgtatgccgaagaaatcgcacaagcttgggaaaccaatgaaggcctggaacgtgtcgctcgctatagcatggaagatgcgaaagtgacgtacgaactgggcaaggaatttttcccgatggaagcgcagctgtcacgcctgattggccaaccgctgtgggatgtgtcgcgtagctctaccggtaacctggttgaatggttcctgctgcgtaaagcgtatgaacgcaacgaactggcgccgaataaaccggatgaaaaggaactggcacgtcgccgtggcggttatgcaggcggttacgtcaaagaaccggaacgtggcctgtgggataatattgtgtatctggactttcgcagtctgtacccgtccattatcattacccataacgttagtccggacacgctgaatcgcgaaggctgcaaagaatatgatgtggccccggaagttggtcacaagttctgtaaagactttccgggcttcatcccgtccctgctgggtgatctgctggaagaacgccagaagattaagcgtaagatgaaagcaaccgttgatccgctggaaaagaaactgctggactatcgccaacgtgcgatcaaaattctggccaacagctattacggctattacggttatgcgaaagcccgctggtactgccgtgaatgtgcagaatctgtgaccgcttggggccgcgaatatattgaaaccacgatccgtgaaatcgaagaaaagttcggtttcaaggttctgtacgctgataccgacggctttttcgcgacgatcccgggtgcagatgctgaaaccgtgaaaaagaaagctaaggaattcctgaagtacatcaacgcgaaactgccgggcctgctggaactggaatatgaaggcttctacgttcgtggctttttcgtcacgaagaaaaagtacgcggttatcgacgaagaaggcaaaattaccacgcgcggtctggaaatcgtgcgccgtgattggagtgaaattgccaaagaaacccaggcacgtgtcctggaagcaatcctgaaacatggtgatgtggaagaagcggttcgcattgtcaaagaagtgacggaaaagctgtcgaaatatgaagttccgccggaaaaactggtcatccatgaacaaattacccgcgatctgcgtgactacaaagccacgggtccgcacgtggcagttgcaaaacgtctggcagcccgtggcgtgaagattcgtccgggtaccgtgatcagttatattgttctgaaaggctccggtcgcatcggtgaccgtgctattccgtttgatgaattcgacccgacgaaacaccgttacgatgccgaatattacatcgaaaatcaggtcctgccggccgtggaacgcattctgaaagcatttggttatcgcaaggaagatctgcgttaccagaagaccaaacaagtcggcctgggtgcgtggctgaaagtgaaaaagtaa

SEQ ID NO: 262 - DNA, 2328 bp, Artificial Sequence
  Synthetic
atgattctggacgctgactatattacggaaaatggcaagccggttgtgcgcatcttcaaaaaggaaaatggcgaattcaaggtggaatatgatcgcaactttgaaccgtatatttacgccctgctgaaagatgacagtgcaatcgaagaaattaaaaagatcaccgccgaacgccatggcaccgtggttcgtatcacgaaagcagaaaaggttgaacgtaaatttctgggtcgcccggtggaagtttggaaactgtatttcacgcatccgcaggatgtgccggccattcgtgacaaaatccgctctcacccggcagtcgtggatatttatgaatacgacatcccgtttgccaaacgttatctgattgataagggcctggttccgatggaaggtgacgaagaactgaaaatgctggcttttgatatcgaaaccctgtatcacgaaggcgaagaattcgcggaaggtccgattctgatgatctcatacgcagacgaatcggaagctcgcgtgattacctggaaaaaggttgatctgccgtatgttgacgctgtcagcacggaaaaagatatgattaaggcgtttctgcgtgttgtcaaagaaaaggatccggacgttctgatcacctataacggcgataattttgacttcgcttacctgaaaaagcgctgcgaaaaactgggtgtgaagttcattctgggccgtgacggttctgaaccgaaaatccagcgtatgggcgatcgctttgcagtcgacgtgaaaggtcgcattcatttcgatctgtatccggtgattcgtcgcaccatcaacctgccgacctatacgctggaagcggtctacgaagccatttttggccgtccgaaagaaaaggtgtatgccgaagaaatcgcacaagcttgggaaaccaatgaaggcctggaacgtgtcgctcgctatagcatggaagatgcgaaagtgacgtacgaactgggcaaggaatttttcccgatggaagcgcagctgtcacgcctgattggccaaccgctgtgggatgtgtcgcgtagctctaccggtaacctggttgaatggttcctgctgcgtaaagcgtatgaacgcaacgaactggcgccgaataaaccggatgaaaaggaactggcacgtcgccgtggcggttatgcaggcggttacgtcaaagaaccggaacgtggcctgtgggataatattgtgtatctggactttcgcagtctgtacccgtccattatcattacccataacgttagtccggacacgctgaatcgcgaaggctgcaaagaatatgatgtggccccggaagttggtcacaagttctgtaaagactttccgggcttcatcccgtccctgctgggtgatctgctggaagaacgccagaagattaagcgtaagatgaaagcaaccgttgatccgctggaaaagaaactgctggactatcgccaacgtgcgatcaaaattctggccaacagctattacggctattacggttatgcgaaagcccgctggtactgccgtgaatgtgcagaatctgtgaccgcttggggccgcgaatatattgaaaccacgatccgtgaaatcgaagaaaagttcggtttcaaggttctgtacgctgataccgacggctttttcgcgacgatcccgggtgcagatgctgaaaccgtgaaaaagaaagctaaggaattcctgaagtacatcaacgcgaaactgccgggcctgctggaactggaatatgaaggcttctacgttcgtggctttttcgtcacgaagaaaaagtacgcggttatcgacgaagaaggcaaaattaccacgcgcggtctggaaatcgtgcgccgtgattggagtgaaattgccaaagaaacccaggcacgtgtgctggaagctctgctgaaagatggcaatgttgaagaagcggtttccattgtcaaagaagtgacggaaaagctgggtaaatatgaagtcccgccggaaaaactggtgatccatgaacaaattacccgcgaactgaaggattacaaagcgacgggcccgcacgttgctatcgcgaaacgtctggcagcgcgtggcgtgaagattcgtccgggtaccgttatcagctatattgtcctgaaaggctctggtcgtatcggtgaccgcgcgattccgtttgatgaattcgacccgacgaaacatcgctacgatgcagaatattacatcgaaaaccaggttctgccggctgtcgaacgtattctgaaagcgtttggctatcgtgccgaagatctgcgctaccagaaaacccgtcaagtgggcctgggtgtttggctgcaaccgaaaggtaagaaataa

SEQ ID NO: 263 - DNA, 2325 bp, Artificial Sequence
  Synthetic
atgattctggacgctgactatattacggaaaatggcaagccggttgtgcgcatcttcaaaaaggaaaatggcgaattcaaggtggaatatgatcgcaactttgaaccgtatatttacgccctgctgaaagatgacagtgcaatcgaagaaattaaaaagatcaccgccgaacgccatggcaccgtggttcgtatcacgaaagcagaaaaggttgaacgtaaatttctgggtcgcccggtggaagtttggaaactgtatttcacgcatccgcaggatgtgccggccattcgtgacaaaatccgctctcacccggcagtcgtggatatttatgaatacgacatcccgtttgccaaacgttatctgattgataagggcctggttccgatggaaggtgacgaagaactgaaaatgctggcttttgatatcgaaaccctgtatcacgaaggcgaagaattcgcggaaggtccgattctgatgatctcatacgcagacgaatcggaagctcgcgtgattacctggaaaaaggttgatctgccgtatgttgacgctgtcagcacggaaaaagatatgattaaggcgtttctgcgtgttgtcaaagaaaaggatccggacgttctgatcacctataacggcgataattttgacttcgcttacctgaaaaagcgctgcgaaaaactgggtgtgaagttcattctgggccgtgacggttctgaaccgaaaatccagcgtatgggcgatcgctttgcagtcgacgtgaaaggtcgcattcatttcgatctgtatccggtgattcgtcgcaccatcaacctgccgacctatacgctggaagcggtctacgaagccatttttggccgtccgaaagaaaaggtgtatgccgaagaaatcgcacaagcttgggaaaccaatgaaggcctggaacgtgtcgctcgctatagcatggaagatgcgaaagtgacgtacgaactgggcaaggaatttttcccgatggaagcgcagctgtcacgcctgattggccaaccgctgtgggatgtgtcgcgtagctctaccggtaacctggttgaatggttcctgctgcgtaaagcgtatgaacgcaacgaactggcgccgaataaaccggatgaaaaggaactggcacgtcgccgtggcggttatgcaggcggttacgtcaaagaaccggaacgtggcctgtgggataatattgtgtatctggactttcgcagtctgtacccgtccattatcattacccataacgttagtccggacacgctgaatcgcgaaggctgcaaagaatatgatgtggccccggaagttggtcacaagttctgtaaagactttccgggcttcatcccgtccctgctgggtgatctgctggaagaacgccagaagattaagcgtaagatgaaagcaaccgttgatccgctggaaaagaaactgctggactatcgccaacgtgcgatcaaaattctggccaacagctattacggctattacggttatgcgaaagcccgctggtactgccgtgaatgtgcagaatctgtgaccgcttggggccgcgaatatattgaaaccacgatccgtgaaatcgaagaaaagttcggtttcaaggttctgtacgctgataccgacggctttttcgcgacgatcccgggtgcagatgctgaaaccgtgaaaaagaaagctaaggaattcctgaagtacatcaacgcgaaactgccgggcctgctggaactggaatatgaaggcttctacgttcgtggctttttcgtcacgaagaaaaagtacgcggttatcgacgaagaaggcaaaattaccacgcgcggtctggaaatcgtgcgccgtgattggagtgaaattgccaaagaaacccaggcaaaggttctggaagcaattctgaaacatggtaacgtcgaagaagcggtcaagatcgtgaaagaagttaccgaaaaactgtcgaattatgaaattccggtcgaaaagctggtgatctacgaacaaattacgcgcccgctgaacgaatataaagccattggcccgcacgtggcagttgctaaacgtctggcggccaagggtatcaagattaaaccgggcatggtgattggttatgttgtcctgcgcggcgatggtccgatcagcaaacgtgcgatcgccatcgaagaattcgatggcaaaaagcataagtacgacgcagaatactacatcgaaaatcaggttctgccggccgtcgaacgtatcctgaaagcattcggttataagcgtgaagatctgcgctggcagaagaccaaacaagtgggcctgggtgcgtggctgaaagttaaaaagtcttaa

SEQ ID NO: 264 - DNA, 2328 bp, Artificial Sequence
  Synthetic
atgattctggacgctgactatattacggaaaatggcaagccggttgtgcgcatcttcaaaaaggaaaatggcgaattcaaggtggaatatgatcgcaactttgaaccgtatatttacgccctgctgaaagatgacagtgcaatcgaagaaattaaaaagatcaccgccgaacgccatggcaccgtggttcgtatcacgaaagcagaaaaggttgaacgtaaatttctgggtcgcccggtggaagtttggaaactgtatttcacgcatccgcaggatgtgccggccattcgtgacaaaatccgctctcacccggcagtcgtggatatttatgaatacgacatcccgtttgccaaacgttatctgattgataagggcctggttccgatggaaggtgacgaagaactgaaaatgctggcttttgatatcgaaaccctgtatcacgaaggcgaagaattcgcggaaggtccgattctgatgatctcatacgcagacgaatcggaagctcgcgtgattacctggaaaaaggttgatctgccgtatgttgacgctgtcagcacggaaaaagatatgattaaggcgtttctgcgtgttgtcaaagaaaaggatccggacgttctgatcacctataacggcgataattttgacttcgcttacctgaaaaagcgctgcgaaaaactgggtgtgaagttcattctgggccgtgacggttctgaaccgaaaatccagcgtatgggcgatcgctttgcagtcgacgtgaaaggtcgcattcatttcgatctgtatccggtgattcgtcgcaccatcaacctgccgacctatacgctggaagcggtctacgaagccatttttggccgtccgaaagaaaaggtgtatgccgaagaaatcgcacaagcttgggaaaccaatgaaggcctggaacgtgtcgctcgctatagcatggaagatgcgaaagtgacgtacgaactgggcaaggaatttttcccgatggaagcgcagctgtcacgcctgattggccaaccgctgtgggatgtgtcgcgtagctctaccggtaacctggttgaatggttcctgctgcgtaaagcgtatgaacgcaacgaactggcgccgaataaaccggatgaaaaggaactggcacgtcgccgtggcggttatgcaggcggttacgtcaaagaaccggaacgtggcctgtgggataatattgtgtatctggactttcgcagtctgtacccgtccattatcattacccataacgttagtccggacacgctgaatcgcgaaggctgcaaagaatatgatgtggccccggaagttggtcacaagttctgtaaagactttccgggcttcatcccgtccctgctgggtgatctgctggaagaacgccagaagattaagcgtaagatgaaagcaaccgttgatccgctggaaaagaaactgctggactatcgccaacgtgcgatcaaaattctggccaacagctattacggctattacggttatgcgaaagcccgctggtactgccgtgaatgtgcagaatctgtgaccgcttggggccgcgaatatattgaaaccacgatccgtgaaatcgaagaaaagttcggtttcaaggttctgtacgctgataccgacggctttttcgcgacgatcccgggtgcagatgctgaaaccgtgaaaaagaaagctaaggaattcctgaagtacatcaacgcgaaactgccgggcctgctggaactggaatatgaaggcttctacgttcgtggctttttcgtcacgaagaaaaagtacgcggttatcgacgaagaaggcaaaattaccacgcgcggtctggaaatcgtgcgccgtgattggagtgaaattgccaaagaaacccaggcacgtgttctggaagcactgctgaaagatggtaatgtcgaagaagcagtgagtattgttaaagaagtcacggaaaaactgtccaagtatgaagtcccgccggaaaaactggtgattcatgaacaaatcacccgcgaactgaaagattacaaggcgacgggcccgcacgtggcaattgctaaacgtctggcagcgcgtggcgttaagatccgtccgggtaccgttattagctatatcgtcctgaaaggctctggtcgtattggtgaccgcgccatcccgtttgatgaattcgacccggctaaacaccgctacgatgcggaatattacattgaaaatcaggtcctgccggctgtggaacgtatcctgaaagcgtttggctatcgtaaggaagatctgcgctaccagaaaacccgtcaagtgggcctgggtgcgtggctgaaaccgaagggtaaaaagtaa

SEQ ID NO: 265 - DNA, 2328 bp, Artificial Sequence
  Synthetic
atgattctggacgctgactatattacggaaaatggcaagccggttgtgcgcatcttcaaaaaggaaaatggcgaattcaaggtggaatatgatcgcaactttgaaccgtatatttacgccctgctgaaagatgacagtgcaatcgaagaaattaaaaagatcaccgccgaacgccatggcaccgtggttcgtatcacgaaagcagaaaaggttgaacgtaaatttctgggtcgcccggtggaagtttggaaactgtatttcacgcatccgcaggatgtgccggccattcgtgacaaaatccgctctcacccggcagtcgtggatatttatgaatacgacatcccgtttgccaaacgttatctgattgataagggcctggttccgatggaaggtgacgaagaactgaaaatgctggcttttgatatcgaaaccctgtatcacgaaggcgaagaattcgcggaaggtccgattctgatgatctcatacgcagacgaatcggaagctcgcgtgattacctggaaaaaggttgatctgccgtatgttgacgctgtcagcacggaaaaagatatgattaaggcgtttctgcgtgttgtcaaagaaaaggatccggacgttctgatcacctataacggcgataattttgacttcgcttacctgaaaaagcgctgcgaaaaactgggtgtgaagttcattctgggccgtgacggttctgaaccgaaaatccagcgtatgggcgatcgctttgcagtcgacgtgaaaggtcgcattcatttcgatctgtatccggtgattcgtcgcaccatcaacctgccgacctatacgctggaagcggtctacgaagccatttttggccgtccgaaagaaaaggtgtatgccgaagaaatcgcacaagcttgggaaaccaatgaaggcctggaacgtgtcgctcgctatagcatggaagatgcgaaagtgacgtacgaactgggcaaggaatttttcccgatggaagcgcagctgtcacgcctgattggccaaccgctgtgggatgtgtcgcgtagctctaccggtaacctggttgaatggttcctgctgcgtaaagcgtatgaacgcaacgaactggcgccgaataaaccggatgaaaaggaactggcacgtcgccgtggcggttatgcaggcggttacgtcaaagaaccggaacgtggcctgtgggataatattgtgtatctggactttcgcagtctgtacccgtccattatcattacccataacgttagtccggacacgctgaatcgcgaaggctgcaaagaatatgatgtggccccggaagttggtcacaagttctgtaaagactttccgggcttcatcccgtccctgctgggtgatctgctggaagaacgccagaagattaagcgtaagatgaaagcaaccgttgatccgctggaaaagaaactgctggactatcgccaacgtgcgatcaaaattctggccaacagctattacggctattacggttatgcgaaagcccgctggtactgccgtgaatgtgcagaatctgtgaccgcttggggccgcgaatatattgaaaccacgatccgtgaaatcgaagaaaagttcggtttcaaggttctgtacgctgataccgacggctttttcgcgacgatcccgggtgcagatgctgaaaccgtgaaaaagaaagctaaggaattcctgaagtacatcaacgcgaaactgccgggcctgctggaactggaatatgaaggcttctacgttcgtggctttttcgtcacgaagaaaaagtacgcggttatcgacgaagaaggcaaaattaccacgcgcggtctggaaatcgtgcgccgtgattggagtgaaattgccaaagaaacccaggcacgcgtcctggaagcaatcctgaaagatggtgacgtggaagaagccgtccgtattgtgaaagaagttacggaaaaactgtccaaatatgaagttccgccggaaaaactggtcatccatgaacaaattacccgcgaactgaaagattacaaagcgacgggcccgcacgtcgcaatcgctaaacgtctggcggcgcgtggcgtgaaaattcgtccgggtaccgtgatctcatatattgttctgaaaggctcgggtcgtatcggtgaccgcgctattccgtttgatgaattcgacccgaaaaaacacaaatacgatgcggaatactacatcgaaaaccaggttctgccggccgtcgaacgtattctgcgcgcatttggctaccgtaaagaagatctgcgttatcaaaaaaccaaacaagtgggtctgggtgcgtggctgaaaccgaaaggtaaaaaataa

SEQ ID NO: 266 - DNA, 2325 bp, Artificial Sequence
  Synthetic
atgattctggacgctgactatattacggaaaatggcaagccggttgtgcgcatcttcaaaaaggaaaatggcgaattcaaggtggaatatgatcgcaactttgaaccgtatatttacgccctgctgaaagatgacagtgcaatcgaagaaattaaaaagatcaccgccgaacgccatggcaccgtggttcgtatcacgaaagcagaaaaggttgaacgtaaatttctgggtcgcccggtggaagtttggaaactgtatttcacgcatccgcaggatgtgccggccattcgtgacaaaatccgctctcacccggcagtcgtggatatttatgaatacgacatcccgtttgccaaacgttatctgattgataagggcctggttccgatggaaggtgacgaagaactgaaaatgctggcttttgatatcgaaaccctgtatcacgaaggcgaagaattcgcggaaggtccgattctgatgatctcatacgcagacgaatcggaagctcgcgtgattacctggaaaaaggttgatctgccgtatgttgacgctgtcagcacggaaaaagatatgattaaggcgtttctgcgtgttgtcaaagaaaaggatccggacgttctgatcacctataacggcgataattttgacttcgcttacctgaaaaagcgctgcgaaaaactgggtgtgaagttcattctgggccgtgacggttctgaaccgaaaatccagcgtatgggcgatcgctttgcagtcgacgtgaaaggtcgcattcatttcgatctgtatccggtgattcgtcgcaccatcaacctgccgacctatacgctggaagcggtctacgaagccatttttggccgtccgaaagaaaaggtgtatgccgaagaaatcgcacaagcttgggaaaccaatgaaggcctggaacgtgtcgctcgctatagcatggaagatgcgaaagtgacgtacgaactgggcaaggaatttttcccgatggaagcgcagctgtcacgcctgattggccaaccgctgtgggatgtgtcgcgtagctctaccggtaacctggttgaatggttcctgctgcgtaaagcgtatgaacgcaacgaactggcgccgaataaaccggatgaaaaggaactggcacgtcgccgtggcggttatgcaggcggttacgtcaaagaaccggaacgtggcctgtgggataatattgtgtatctggactttcgcagtctgtacccgtccattatcattacccataacgttagtccggacacgctgaatcgcgaaggctgcaaagaatatgatgtggccccggaagttggtcacaagttctgtaaagactttccgggcttcatcccgtccctgctgggtgatctgctggaagaacgccagaagattaagcgtaagatgaaagcaaccgttgatccgctggaaaagaaactgctggactatcgccaacgtgcgatcaaaattctggccaacagctattacggctattacggttatgcgaaagcccgctggtactgccgtgaatgtgcagaatctgtgaccgcttggggccgcgaatatattgaaaccacgatccgtgaaatcgaagaaaagttcggtttcaaggttctgtacgctgataccgacggctttttcgcgacgatcccgggtgcagatgctgaaaccgtgaaaaagaaagctaaggaattcctgaagtacatcaacgcgaaactgccgggcctgctggaactggaatatgaaggcttctacgttcgtggctttttcgtcacgaagaaaaagtacgcggttatcgacgaagaaggcaaaattaccacgcgcggtctggaaatcgtgcgccgtgattggagtgaaattgccaaagaaacccaggcacgtgttctggaagcaattctgaaacatggtaacgtcgaagaagcggtcaaaatcgtgaaagaagttacggaaaaactgtctaactacgaaattccgccggaaaaactggccatctacgaacaaattacccgcccgctgcatgaatataaagcaatcggtccgcacgtcgcagtggcaaaacgtctggcagcacgcggcgttaaagtcaaaccgggtatggtcatcggctatattgtgctgcgtggtgatggcccgatcagcaaccgcgcaattctggctgaagaatacgatctgaaaaaacacaaatacgacgccgaatattacatcgaaaatcaggttctgccggctgtcctgcgtattctggaagcgtttggctatcgtaaagaagatctgcgctggcagaaaacccgtcaaacgggtctgacctcatggctgaatattaaaaaatcgtaa

SEQ ID NO: 267 - DNA, 2325 bp, Artificial Sequence
  Synthetic
atgattctggacgctgactatattacggaaaatggcaagccggttgtgcgcatcttcaaaaaggaaaatggcgaattcaaggtggaatatgatcgcaactttgaaccgtatatttacgccctgctgaaagatgacagtgcaatcgaagaaattaaaaagatcaccgccgaacgccatggcaccgtggttcgtatcacgaaagcagaaaaggttgaacgtaaatttctgggtcgcccggtggaagtttggaaactgtatttcacgcatccgcaggatgtgccggccattcgtgacaaaatccgctctcacccggcagtcgtggatatttatgaatacgacatcccgtttgccaaacgttatctgattgataagggcctggttccgatggaaggtgacgaagaactgaaaatgctggcttttgatatcgaaaccctgtatcacgaaggcgaagaattcgcggaaggtccgattctgatgatctcatacgcagacgaatcggaagctcgcgtgattacctggaaaaaggttgatctgccgtatgttgacgctgtcagcacggaaaaagatatgattaaggcgtttctgcgtgttgtcaaagaaaaggatccggacgttctgatcacctataacggcgataattttgacttcgcttacctgaaaaagcgctgcgaaaaactgggtgtgaagttcattctgggccgtgacggttctgaaccgaaaatccagcgtatgggcgatcgctttgcagtcgacgtgaaaggtcgcattcatttcgatctgtatccggtgattcgtcgcaccatcaacctgccgacctatacgctggaagcggtctacgaagccatttttggccgtccgaaagaaaaggtgtatgccgaagaaatcgcacaagcttgggaaaccaatgaaggcctggaacgtgtcgctcgctatagcatggaagatgcgaaagtgacgtacgaactgggcaaggaatttttcccgatggaagcgcagctgtcacgcctgattggccaaccgctgtgggatgtgtcgcgtagctctaccggtaacctggttgaatggttcctgctgcgtaaagcgtatgaacgcaacgaactggcgccgaataaaccggatgaaaaggaactggcacgtcgccgtggcggttatgcaggcggttacgtcaaagaaccggaacgtggcctgtgggataatattgtgtatctggactttcgcagtctgtacccgtccattatcattacccataacgttagtccggacacgctgaatcgcgaaggctgcaaagaatatgatgtggccccggaagttggtcacaagttctgtaaagactttccgggcttcatcccgtccctgctgggtgatctgctggaagaacgccagaagattaagcgtaagatgaaagcaaccgttgatccgctggaaaagaaactgctggactatcgccaacgtgcgatcaaaattctggccaacagctattacggctattacggttatgcgaaagcccgctggtactgccgtgaatgtgcagaatctgtgaccgcttggggccgcgaatatattgaaaccacgatccgtgaaatcgaagaaaagttcggtttcaaggttctgtacgctgataccgacggctttttcgcgacgatcccgggtgcagatgctgaaaccgtgaaaaagaaagctaaggaattcctgaagtacatcaacgcgaaactgccgggcctgctggaactggaatatgaaggcttctacgttcgtggctttttcgtcacgaagaaaaagtacgcggttatcgacgaagaaggcaaaattaccacgcgcggtctggaaatcgtgcgccgtgattggagtgaaattgccaaagaaacccaggcaaaagttctggaagcaatcctgaaacatggtaatgtcgaagaagcagtgaaaattgtcaaggaagtgacggaaaaactgtcgaagtatgaaatcccgccggaaaaactggtgatctacgaacaaattacccgcccgctgcatgaatataaagcgattggcccgcacgtggcagttgctaaacgtctggcagcccgcggtgtcaaagtgcgtccgggcatggtgatcggttatattgttctgcgtggcgatggtccgatcagtaaacgcgcgattctggccgaagaatttgatccgcgcaaacacaagtacgacgccgaatattacatcgaaaaccaggtgctgccggctgttctgcgtattctggaagcgttcggctatcgtaaagaagatctgcgctggcagaaaaccaagcaaacgggtctgaccgcatggctgaatgtgaaaaagaaataa

SEQ ID NO: 268 - DNA, 2328 bp, Artificial Sequence
  Synthetic
atgattctggacgctgactatattacggaaaatggcaagccggttgtgcgcatcttcaaaaaggaaaatggcgaattcaaggtggaatatgatcgcaactttgaaccgtatatttacgccctgctgaaagatgacagtgcaatcgaagaaattaaaaagatcaccgccgaacgccatggcaccgtggttcgtatcacgaaagcagaaaaggttgaacgtaaatttctgggtcgcccggtggaagtttggaaactgtatttcacgcatccgcaggatgtgccggccattcgtgacaaaatccgctctcacccggcagtcgtggatatttatgaatacgacatcccgtttgccaaacgttatctgattgataagggcctggttccgatggaaggtgacgaagaactgaaaatgctggcttttgatatcgaaaccctgtatcacgaaggcgaagaattcgcggaaggtccgattctgatgatctcatacgcagacgaatcggaagctcgcgtgattacctggaaaaaggttgatctgccgtatgttgacgctgtcagcacggaaaaagatatgattaaggcgtttctgcgtgttgtcaaagaaaaggatccggacgttctgatcacctataacggcgataattttgacttcgcttacctgaaaaagcgctgcgaaaaactgggtgtgaagttcattctgggccgtgacggttctgaaccgaaaatccagcgtatgggcgatcgctttgcagtcgacgtgaaaggtcgcattcatttcgatctgtatccggtgattcgtcgcaccatcaacctgccgacctatacgctggaagcggtctacgaagccatttttggccgtccgaaagaaaaggtgtatgccgaagaaatcgcacaagcttgggaaaccaatgaaggcctggaacgtgtcgctcgctatagcatggaagatgcgaaagtgacgtacgaactgggcaaggaatttttcccgatggaagcgcagctgtcacgcctgattggccaaccgctgtgggatgtgtcgcgtagctctaccggtaacctggttgaatggttcctgctgcgtaaagcgtatgaacgcaacgaaattgcgccgaataaaccggatgaacgtgaactggcacgtcgccgtggcggttatgcaggcggttacgttaaagaaccggaacgcggcctgtgggataatatcgtctatctggactttatgagtctgtacccgtccattatcattacccataacgttagtccggacacgttcaatcgtgaaggctgcaaagaatatgataccgccccgcaggttggtcacaagttttgtaaagacgtccaaggcttcattccgagtctgctgggtgccctgctggatgaacgccagaaaatcaagaaacgtatgaaggcatccattgatccgctggaaaagaaactgctggactatcgccaaaaggcgatcaaaattctggccaactcatattacggctattacggttatgcacgcgctcgttggtactgcaaagaatgtgcagaatcggtgaccgcttggggccgtgattatattgaaaccacgatccacgaaattgaagaacgctttggtttcaaagttctgtacgctgataccgacggctttttcgcgacgatcccgggtgcggatgccgaaaccgtgaagaaaaaggctaaggaattcctgaagtacatcaacgcgaaactgccgggcctgctggaactggaatatgaaggcttctacgtccgtggctttttcgtgaccaaaaagaaatacgcggttatcgacgaagaaggcaaaattaccacgcgcggtctggaaatcgtgcgccgtgattggagtgaaattgccaaagaaacccaggcacgcgttctggaagcaatcctgcgtcatggtgacgtcgaagaagccgttcgcattgtcaaagatgtgacggaaaagctgtcgaaatatgaagtcccgccggaaaaactggtgatccatgaacaaattacccgtgaactgaaggattacaaagcgacgggcccgcacgttgcaattgctaaacgcctggcagcccgtggcatcaagattcgtccgggtaccgttatcagctatattgtcctgaaaggctctggtcgcatcggtgatcgtgctattccgtttgatgaattcgacccgacgaaacaccgttacgatgccgaatattacatcgaaaatcaggtgctgccggccgttgaacgcattctgaaagcatttggctataagaaagaagaactgcgctaccagaaaacccgtcaagtgggcctgggtgcgtggctgaagctgaaaggtaagaaataa

SEQ ID NO: 269 - DNA, 2322 bp, Artificial Sequence
  Synthetic
atgattctggacgctgactatattacggaaaatggcaagccggttgtgcgcatcttcaaaaaggaaaatggcgaattcaaggtggaatatgatcgcaactttgaaccgtatatttacgccctgctgaaagatgacagtgcaatcgaagaaattaaaaagatcaccgccgaacgccatggcaccgtggttcgtatcacgaaagcagaaaaggttgaacgtaaatttctgggtcgcccggtggaagtttggaaactgtatttcacgcatccgcaggatgtgccggccattcgtgacaaaatccgctctcacccggcagtcgtggatatttatgaatacgacatcccgtttgccaaacgttatctgattgataagggcctggttccgatggaaggtgacgaagaactgaaaatgctggcttttgatatcgaaaccctgtatcacgaaggcgaagaattcgcggaaggtccgattctgatgatctcatacgcagacgaatcggaagctcgcgtgattacctggaaaaaggttgatctgccgtatgttgacgctgtcagcacggaaaaagatatgattaaggcgtttctgcgtgttgtcaaagaaaaggatccggacgttctgatcacctataacggcgataattttgacttcgcttacctgaaaaagcgctgcgaaaaactgggtgtgaagttcattctgggccgtgacggttctgaaccgaaaatccagcgtatgggcgatcgctttgcagtcgacgtgaaaggtcgcattcatttcgatctgtatccggtgattcgtcgcaccatcaacctgccgacctatacgctggaagcggtctacgaagccatttttggccgtccgaaagaaaaggtgtatgccgaagaaatcgcacaagcttgggaaaccaatgaaggcctggaacgtgtcgctcgctatagcatggaagatgcgaaagtgacgtacgaactgggcaaggaatttttcccgatggaagcgcagctgtcacgcctgattggccaaccgctgtgggatgtgtcgcgtagctctaccggtaacctggttgaatggttcctgctgcgtaaagcgtatgaacgcaacgaaattgcgccgaataaaccggatgaacgtgaactggcacgtcgccgtggcggttatgcaggcggttacgttaaagaaccggaacgcggcctgtgggataatatcgtctatctggactttatgagtctgtacccgtccattatcattacccataacgttagtccggacacgttcaatcgtgaaggctgcaaagaatatgataccgccccgcaggttggtcacaagttttgtaaagacgtccaaggcttcattccgagtctgctgggtgccctgctggatgaacgccagaaaatcaagaaacgtatgaaggcatccattgatccgctggaaaagaaactgctggactatcgccaaaaggcgatcaaaattctggccaactcatattacggctattacggttatgcacgcgctcgttggtactgcaaagaatgtgcagaatcggtgaccgcttggggccgtgattatattgaaaccacgatccacgaaattgaagaacgctttggtttcaaagttctgtacgctgataccgacggctttttcgcgacgatcccgggtgcggatgccgaaaccgtgaagaaaaaggctaaggaattcctgaagtacatcaacgcgaaactgccgggcctgctggaactggaatatgaaggcttctacgtccgtggctttttcgtgaccaaaaagaaatacgcggttatcgacgaagaaggcaaaattaccacgcgcggtctggaaatcgtgcgccgtgattggagtgaaattgccaaagaaacccaggcacgtgtcctggaagcaatcctgaaacatggtgatgtggaagaagcggttcgcattgtcaaagaagtgacggaaaagctgtcgaaatatgaagttccgccggaaaaactggtcatccatgaacaaattacccgcgatctgcgtgactacaaagccacgggtccgcacgtggcagttgcaaaacgtctggcagcccgtggcgtgaagattcgtccgggtaccgtgatcagttatattgttctgaaaggctccggtcgcatcggtgaccgtgctattccgtttgatgaattcgacccgacgaaacaccgttacgatgccgaatattacatcgaaaatcaggtcctgccggccgtggaacgcattctgaaagcatttggttatcgcaaggaagatctgcgttaccagaagaccaaacaagtcggcctgggtgcgtggctgaaagtgaaaaagtaa

SEQ ID NO: 270 - DNA, 2328 bp, Artificial Sequence
  Synthetic
atgattctggacgctgactatattacggaaaatggcaagccggttgtgcgcatcttcaaaaaggaaaatggcgaattcaaggtggaatatgatcgcaactttgaaccgtatatttacgccctgctgaaagatgacagtgcaatcgaagaaattaaaaagatcaccgccgaacgccatggcaccgtggttcgtatcacgaaagcagaaaaggttgaacgtaaatttctgggtcgcccggtggaagtttggaaactgtatttcacgcatccgcaggatgtgccggccattcgtgacaaaatccgctctcacccggcagtcgtggatatttatgaatacgacatcccgtttgccaaacgttatctgattgataagggcctggttccgatggaaggtgacgaagaactgaaaatgctggcttttgatatcgaaaccctgtatcacgaaggcgaagaattcgcggaaggtccgattctgatgatctcatacgcagacgaatcggaagctcgcgtgattacctggaaaaaggttgatctgccgtatgttgacgctgtcagcacggaaaaagatatgattaaggcgtttctgcgtgttgtcaaagaaaaggatccggacgttctgatcacctataacggcgataattttgacttcgcttacctgaaaaagcgctgcgaaaaactgggtgtgaagttcattctgggccgtgacggttctgaaccgaaaatccagcgtatgggcgatcgctttgcagtcgacgtgaaaggtcgcattcatttcgatctgtatccggtgattcgtcgcaccatcaacctgccgacctatacgctggaagcggtctacgaagccatttttggccgtccgaaagaaaaggtgtatgccgaagaaatcgcacaagcttgggaaaccaatgaaggcctggaacgtgtcgctcgctatagcatggaagatgcgaaagtgacgtacgaactgggcaaggaatttttcccgatggaagcgcagctgtcacgcctgattggccaaccgctgtgggatgtgtcgcgtagctctaccggtaacctggttgaatggttcctgctgcgtaaagcgtatgaacgcaacgaaattgcgccgaataaaccggatgaacgtgaactggcacgtcgccgtggcggttatgcaggcggttacgttaaagaaccggaacgcggcctgtgggataatatcgtctatctggactttatgagtctgtacccgtccattatcattacccataacgttagtccggacacgttcaatcgtgaaggctgcaaagaatatgataccgccccgcaggttggtcacaagttttgtaaagacgtccaaggcttcattccgagtctgctgggtgccctgctggatgaacgccagaaaatcaagaaacgtatgaaggcatccattgatccgctggaaaagaaactgctggactatcgccaaaaggcgatcaaaattctggccaactcatattacggctattacggttatgcacgcgctcgttggtactgcaaagaatgtgcagaatcggtgaccgcttggggccgtgattatattgaaaccacgatccacgaaattgaagaacgctttggtttcaaagttctgtacgctgataccgacggctttttcgcgacgatcccgggtgcggatgccgaaaccgtgaagaaaaaggctaaggaattcctgaagtacatcaacgcgaaactgccgggcctgctggaactggaatatgaaggcttctacgtccgtggctttttcgtgaccaaaaagaaatacgcggttatcgacgaagaaggcaaaattaccacgcgcggtctggaaatcgtgcgccgtgattggagtgaaattgccaaagaaacccaggcacgtgtgctggaagctctgctgaaagatggcaatgttgaagaagcggtttccattgtcaaagaagtgacggaaaagctgggtaaatatgaagtcccgccggaaaaactggtgatccatgaacaaattacccgcgaactgaaggattacaaagcgacgggcccgcacgttgctatcgcgaaacgtctggcagcgcgtggcgtgaagattcgtccgggtaccgttatcagctatattgtcctgaaaggctctggtcgtatcggtgaccgcgcgattccgtttgatgaattcgacccgacgaaacatcgctacgatgcagaatattacatcgaaaaccaggttctgccggctgtcgaacgtattctgaaagcgtttggctatcgtgccgaagatctgcgctaccagaaaacccgtcaagtgggcctgggtgtttggctgcaaccgaaaggtaagaaataa

SEQ ID NO: 271 - DNA, 2325 bp, Artificial Sequence
  Synthetic
atgattctggacgctgactatattacggaaaatggcaagccggttgtgcgcatcttcaaaaaggaaaatggcgaattcaaggtggaatatgatcgcaactttgaaccgtatatttacgccctgctgaaagatgacagtgcaatcgaagaaattaaaaagatcaccgccgaacgccatggcaccgtggttcgtatcacgaaagcagaaaaggttgaacgtaaatttctgggtcgcccggtggaagtttggaaactgtatttcacgcatccgcaggatgtgccggccattcgtgacaaaatccgctctcacccggcagtcgtggatatttatgaatacgacatcccgtttgccaaacgttatctgattgataagggcctggttccgatggaaggtgacgaagaactgaaaatgctggcttttgatatcgaaaccctgtatcacgaaggcgaagaattcgcggaaggtccgattctgatgatctcatacgcagacgaatcggaagctcgcgtgattacctggaaaaaggttgatctgccgtatgttgacgctgtcagcacggaaaaagatatgattaaggcgtttctgcgtgttgtcaaagaaaaggatccggacgttctgatcacctataacggcgataattttgacttcgcttacctgaaaaagcgctgcgaaaaactgggtgtgaagttcattctgggccgtgacggttctgaaccgaaaatccagcgtatgggcgatcgctttgcagtcgacgtgaaaggtcgcattcatttcgatctgtatccggtgattcgtcgcaccatcaacctgccgacctatacgctggaagcggtctacgaagccatttttggccgtccgaaagaaaaggtgtatgccgaagaaatcgcacaagcttgggaaaccaatgaaggcctggaacgtgtcgctcgctatagcatggaagatgcgaaagtgacgtacgaactgggcaaggaatttttcccgatggaagcgcagctgtcacgcctgattggccaaccgctgtgggatgtgtcgcgtagctctaccggtaacctggttgaatggttcctgctgcgtaaagcgtatgaacgcaacgaaattgcgccgaataaaccggatgaacgtgaactggcacgtcgccgtggcggttatgcaggcggttacgttaaagaaccggaacgcggcctgtgggataatatcgtctatctggactttatgagtctgtacccgtccattatcattacccataacgttagtccggacacgttcaatcgtgaaggctgcaaagaatatgataccgccccgcaggttggtcacaagttttgtaaagacgtccaaggcttcattccgagtctgctgggtgccctgctggatgaacgccagaaaatcaagaaacgtatgaaggcatccattgatccgctggaaaagaaactgctggactatcgccaaaaggcgatcaaaattctggccaactcatattacggctattacggttatgcacgcgctcgttggtactgcaaagaatgtgcagaatcggtgaccgcttggggccgtgattatattgaaaccacgatccacgaaattgaagaacgctttggtttcaaagttctgtacgctgataccgacggctttttcgcgacgatcccgggtgcggatgccgaaaccgtgaagaaaaaggctaaggaattcctgaagtacatcaacgcgaaactgccgggcctgctggaactggaatatgaaggcttctacgtccgtggctttttcgtgaccaaaaagaaatacgcggttatcgacgaagaaggcaaaattaccacgcgcggtctggaaatcgtgcgccgtgattggagtgaaattgccaaagaaacccaggcaaaggttctggaagcaattctgaaacatggtaacgtcgaagaagcggtcaagatcgtgaaagaagttaccgaaaaactgtcgaattatgaaattccggtcgaaaagctggtgatctacgaacaaattacgcgcccgctgaacgaatataaagccattggcccgcacgtggcagttgctaaacgtctggcggccaagggtatcaagattaaaccgggcatggtgattggttatgttgtcctgcgcggcgatggtccgatcagcaaacgtgcgatcgccatcgaagaattcgatggcaaaaagcataagtacgacgcagaatactacatcgaaaatcaggttctgccggccgtcgaacgtatcctgaaagcattcggttataagcgtgaagatctgcgctggcagaagaccaaacaagtgggcctgggtgcgtggctgaaagttaaaaagtcttaa

SEQ ID NO: 272 - DNA, 2328 bp, Artificial Sequence
  Synthetic
atgattctggacgctgactatattacggaaaatggcaagccggttgtgcgcatcttcaaaaaggaaaatggcgaattcaaggtggaatatgatcgcaactttgaaccgtatatttacgccctgctgaaagatgacagtgcaatcgaagaaattaaaaagatcaccgccgaacgccatggcaccgtggttcgtatcacgaaagcagaaaaggttgaacgtaaatttctgggtcgcccggtggaagtttggaaactgtatttcacgcatccgcaggatgtgccggccattcgtgacaaaatccgctctcacccggcagtcgtggatatttatgaatacgacatcccgtttgccaaacgttatctgattgataagggcctggttccgatggaaggtgacgaagaactgaaaatgctggcttttgatatcgaaaccctgtatcacgaaggcgaagaattcgcggaaggtccgattctgatgatctcatacgcagacgaatcggaagctcgcgtgattacctggaaaaaggttgatctgccgtatgttgacgctgtcagcacggaaaaagatatgattaaggcgtttctgcgtgttgtcaaagaaaaggatccggacgttctgatcacctataacggcgataattttgacttcgcttacctgaaaaagcgctgcgaaaaactgggtgtgaagttcattctgggccgtgacggttctgaaccgaaaatccagcgtatgggcgatcgctttgcagtcgacgtgaaaggtcgcattcatttcgatctgtatccggtgattcgtcgcaccatcaacctgccgacctatacgctggaagcggtctacgaagccatttttggccgtccgaaagaaaaggtgtatgccgaagaaatcgcacaagcttgggaaaccaatgaaggcctggaacgtgtcgctcgctatagcatggaagatgcgaaagtgacgtacgaactgggcaaggaatttttcccgatggaagcgcagctgtcacgcctgattggccaaccgctgtgggatgtgtcgcgtagctctaccggtaacctggttgaatggttcctgctgcgtaaagcgtatgaacgcaacgaaattgcgccgaataaaccggatgaacgtgaactggcacgtcgccgtggcggttatgcaggcggttacgttaaagaaccggaacgcggcctgtgggataatatcgtctatctggactttatgagtctgtacccgtccattatcattacccataacgttagtccggacacgttcaatcgtgaaggctgcaaagaatatgataccgccccgcaggttggtcacaagttttgtaaagacgtccaaggcttcattccgagtctgctgggtgccctgctggatgaacgccagaaaatcaagaaacgtatgaaggcatccattgatccgctggaaaagaaactgctggactatcgccaaaaggcgatcaaaattctggccaactcatattacggctattacggttatgcacgcgctcgttggtactgcaaagaatgtgcagaatcggtgaccgcttggggccgtgattatattgaaaccacgatccacgaaattgaagaacgctttggtttcaaagttctgtacgctgataccgacggctttttcgcgacgatcccgggtgcggatgccgaaaccgtgaagaaaaaggctaaggaattcctgaagtacatcaacgcgaaactgccgggcctgctggaactggaatatgaaggcttctacgtccgtggctttttcgtgaccaaaaagaaatacgcggttatcgacgaagaaggcaaaattaccacgcgcggtctggaaatcgtgcgccgtgattggagtgaaattgccaaagaaacccaggcacgtgttctggaagcactgctgaaagatggtaatgtcgaagaagcagtgagtattgttaaagaagtcacggaaaaactgtccaagtatgaagtcccgccggaaaaactggtgattcatgaacaaatcacccgcgaactgaaagattacaaggcgacgggcccgcacgtggcaattgctaaacgtctggcagcgcgtggcgttaagatccgtccgggtaccgttattagctatatcgtcctgaaaggctctggtcgtattggtgaccgcgccatcccgtttgatgaattcgacccggctaaacaccgctacgatgcggaatattacattgaaaatcaggtcctgccggctgtggaacgtatcctgaaagcgtttggctatcgtaaggaagatctgcgctaccagaaaacccgtcaagtgggcctgggtgcgtggctgaaaccgaagggtaaaaagtaa

SEQ ID NO: 273 - DNA, 2328 bp, Artificial Sequence
  Synthetic
atgattctggacgctgactatattacggaaaatggcaagccggttgtgcgcatcttcaaaaaggaaaatggcgaattcaaggtggaatatgatcgcaactttgaaccgtatatttacgccctgctgaaagatgacagtgcaatcgaagaaattaaaaagatcaccgccgaacgccatggcaccgtggttcgtatcacgaaagcagaaaaggttgaacgtaaatttctgggtcgcccggtggaagtttggaaactgtatttcacgcatccgcaggatgtgccggccattcgtgacaaaatccgctctcacccggcagtcgtggatatttatgaatacgacatcccgtttgccaaacgttatctgattgataagggcctggttccgatggaaggtgacgaagaactgaaaatgctggcttttgatatcgaaaccctgtatcacgaaggcgaagaattcgcggaaggtccgattctgatgatctcatacgcagacgaatcggaagctcgcgtgattacctggaaaaaggttgatctgccgtatgttgacgctgtcagcacggaaaaagatatgattaaggcgtttctgcgtgttgtcaaagaaaaggatccggacgttctgatcacctataacggcgataattttgacttcgcttacctgaaaaagcgctgcgaaaaactgggtgtgaagttcattctgggccgtgacggttctgaaccgaaaatccagcgtatgggcgatcgctttgcagtcgacgtgaaaggtcgcattcatttcgatctgtatccggtgattcgtcgcaccatcaacctgccgacctatacgctggaagcggtctacgaagccatttttggccgtccgaaagaaaaggtgtatgccgaagaaatcgcacaagcttgggaaaccaatgaaggcctggaacgtgtcgctcgctatagcatggaagatgcgaaagtgacgtacgaactgggcaaggaatttttcccgatggaagcgcagctgtcacgcctgattggccaaccgctgtgggatgtgtcgcgtagctctaccggtaacctggttgaatggttcctgctgcgtaaagcgtatgaacgcaacgaaattgcgccgaataaaccggatgaacgtgaactggcacgtcgccgtggcggttatgcaggcggttacgttaaagaaccggaacgcggcctgtgggataatatcgtctatctggactttatgagtctgtacccgtccattatcattacccataacgttagtccggacacgttcaatcgtgaaggctgcaaagaatatgataccgccccgcaggttggtcacaagttttgtaaagacgtccaaggcttcattccgagtctgctgggtgccctgctggatgaacgccagaaaatcaagaaacgtatgaaggcatccattgatccgctggaaaagaaactgctggactatcgccaaaaggcgatcaaaattctggccaactcatattacggctattacggttatgcacgcgctcgttggtactgcaaagaatgtgcagaatcggtgaccgcttggggccgtgattatattgaaaccacgatccacgaaattgaagaacgctttggtttcaaagttctgtacgctgataccgacggctttttcgcgacgatcccgggtgcggatgccgaaaccgtgaagaaaaaggctaaggaattcctgaagtacatcaacgcgaaactgccgggcctgctggaactggaatatgaaggcttctacgtccgtggctttttcgtgaccaaaaagaaatacgcggttatcgacgaagaaggcaaaattaccacgcgcggtctggaaatcgtgcgccgtgattggagtgaaattgccaaagaaacccaggcacgcgtcctggaagcaatcctgaaagatggtgacgtggaagaagccgtccgtattgtgaaagaagttacggaaaaactgtccaaatatgaagttccgccggaaaaactggtcatccatgaacaaattacccgcgaactgaaagattacaaagcgacgggcccgcacgtcgcaatcgctaaacgtctggcggcgcgtggcgtgaaaattcgtccgggtaccgtgatctcatatattgttctgaaaggctcgggtcgtatcggtgaccgcgctattccgtttgatgaattcgacccgaaaaaacacaaatacgatgcggaatactacatcgaaaaccaggttctgccggccgtcgaacgtattctgcgcgcatttggctaccgtaaagaagatctgcgttatcaaaaaaccaaacaagtgggtctgggtgcgtggctgaaaccgaaaggtaaaaaataa

SEQ ID NO: 274 - DNA, 2325 bp, Artificial Sequence
  Synthetic
atgattctggacgctgactatattacggaaaatggcaagccggttgtgcgcatcttcaaaaaggaaaatggcgaattcaaggtggaatatgatcgcaactttgaaccgtatatttacgccctgctgaaagatgacagtgcaatcgaagaaattaaaaagatcaccgccgaacgccatggcaccgtggttcgtatcacgaaagcagaaaaggttgaacgtaaatttctgggtcgcccggtggaagtttggaaactgtatttcacgcatccgcaggatgtgccggccattcgtgacaaaatccgctctcacccggcagtcgtggatatttatgaatacgacatcccgtttgccaaacgttatctgattgataagggcctggttccgatggaaggtgacgaagaactgaaaatgctggcttttgatatcgaaaccctgtatcacgaaggcgaagaattcgcggaaggtccgattctgatgatctcatacgcagacgaatcggaagctcgcgtgattacctggaaaaaggttgatctgccgtatgttgacgctgtcagcacggaaaaagatatgattaaggcgtttctgcgtgttgtcaaagaaaaggatccggacgttctgatcacctataacggcgataattttgacttcgcttacctgaaaaagcgctgcgaaaaactgggtgtgaagttcattctgggccgtgacggttctgaaccgaaaatccagcgtatgggcgatcgctttgcagtcgacgtgaaaggtcgcattcatttcgatctgtatccggtgattcgtcgcaccatcaacctgccgacctatacgctggaagcggtctacgaagccatttttggccgtccgaaagaaaaggtgtatgccgaagaaatcgcacaagcttgggaaaccaatgaaggcctggaacgtgtcgctcgctatagcatggaagatgcgaaagtgacgtacgaactgggcaaggaatttttcccgatggaagcgcagctgtcacgcctgattggccaaccgctgtgggatgtgtcgcgtagctctaccggtaacctggttgaatggttcctgctgcgtaaagcgtatgaacgcaacgaaattgcgccgaataaaccggatgaacgtgaactggcacgtcgccgtggcggttatgcaggcggttacgttaaagaaccggaacgcggcctgtgggataatatcgtctatctggactttatgagtctgtacccgtccattatcattacccataacgttagtccggacacgttcaatcgtgaaggctgcaaagaatatgataccgccccgcaggttggtcacaagttttgtaaagacgtccaaggcttcattccgagtctgctgggtgccctgctggatgaacgccagaaaatcaagaaacgtatgaaggcatccattgatccgctggaaaagaaactgctggactatcgccaaaaggcgatcaaaattctggccaactcatattacggctattacggttatgcacgcgctcgttggtactgcaaagaatgtgcagaatcggtgaccgcttggggccgtgattatattgaaaccacgatccacgaaattgaagaacgctttggtttcaaagttctgtacgctgataccgacggctttttcgcgacgatcccgggtgcggatgccgaaaccgtgaagaaaaaggctaaggaattcctgaagtacatcaacgcgaaactgccgggcctgctggaactggaatatgaaggcttctacgtccgtggctttttcgtgaccaaaaagaaatacgcggttatcgacgaagaaggcaaaattaccacgcgcggtctggaaatcgtgcgccgtgattggagtgaaattgccaaagaaacccaggcacgtgttctggaagcaattctgaaacatggtaacgtcgaagaagcggtcaaaatcgtgaaagaagttacggaaaaactgtctaactacgaaattccgccggaaaaactggccatctacgaacaaattacccgcccgctgcatgaatataaagcaatcggtccgcacgtcgcagtggcaaaacgtctggcagcacgcggcgttaaagtcaaaccgggtatggtcatcggctatattgtgctgcgtggtgatggcccgatcagcaaccgcgcaattctggctgaagaatacgatctgaaaaaacacaaatacgacgccgaatattacatcgaaaatcaggttctgccggctgtcctgcgtattctggaagcgtttggctatcgtaaagaagatctgcgctggcagaaaacccgtcaaacgggtctgacctcatggctgaatattaaaaaatcgtaa

SEQ ID NO: 275 - DNA, 2325 bp, Artificial Sequence
  Synthetic
atgattctggacgctgactatattacggaaaatggcaagccggttgtgcgcatcttcaaaaaggaaaatggcgaattcaaggtggaatatgatcgcaactttgaaccgtatatttacgccctgctgaaagatgacagtgcaatcgaagaaattaaaaagatcaccgccgaacgccatggcaccgtggttcgtatcacgaaagcagaaaaggttgaacgtaaatttctgggtcgcccggtggaagtttggaaactgtatttcacgcatccgcaggatgtgccggccattcgtgacaaaatccgctctcacccggcagtcgtggatatttatgaatacgacatcccgtttgccaaacgttatctgattgataagggcctggttccgatggaaggtgacgaagaactgaaaatgctggcttttgatatcgaaaccctgtatcacgaaggcgaagaattcgcggaaggtccgattctgatgatctcatacgcagacgaatcggaagctcgcgtgattacctggaaaaaggttgatctgccgtatgttgacgctgtcagcacggaaaaagatatgattaaggcgtttctgcgtgttgtcaaagaaaaggatccggacgttctgatcacctataacggcgataattttgacttcgcttacctgaaaaagcgctgcgaaaaactgggtgtgaagttcattctgggccgtgacggttctgaaccgaaaatccagcgtatgggcgatcgctttgcagtcgacgtgaaaggtcgcattcatttcgatctgtatccggtgattcgtcgcaccatcaacctgccgacctatacgctggaagcggtctacgaagccatttttggccgtccgaaagaaaaggtgtatgccgaagaaatcgcacaagcttgggaaaccaatgaaggcctggaacgtgtcgctcgctatagcatggaagatgcgaaagtgacgtacgaactgggcaaggaatttttcccgatggaagcgcagctgtcacgcctgattggccaaccgctgtgggatgtgtcgcgtagctctaccggtaacctggttgaatggttcctgctgcgtaaagcgtatgaacgcaacgaaattgcgccgaataaaccggatgaacgtgaactggcacgtcgccgtggcggttatgcaggcggttacgttaaagaaccggaacgcggcctgtgggataatatcgtctatctggactttatgagtctgtacccgtccattatcattacccataacgttagtccggacacgttcaatcgtgaaggctgcaaagaatatgataccgccccgcaggttggtcacaagttttgtaaagacgtccaaggcttcattccgagtctgctgggtgccctgctggatgaacgccagaaaatcaagaaacgtatgaaggcatccattgatccgctggaaaagaaactgctggactatcgccaaaaggcgatcaaaattctggccaactcatattacggctattacggttatgcacgcgctcgttggtactgcaaagaatgtgcagaatcggtgaccgcttggggccgtgattatattgaaaccacgatccacgaaattgaagaacgctttggtttcaaagttctgtacgctgataccgacggctttttcgcgacgatcccgggtgcggatgccgaaaccgtgaagaaaaaggctaaggaattcctgaagtacatcaacgcgaaactgccgggcctgctggaactggaatatgaaggcttctacgtccgtggctttttcgtgaccaaaaagaaatacgcggttatcgacgaagaaggcaaaattaccacgcgcggtctggaaatcgtgcgccgtgattggagtgaaattgccaaagaaacccaggcaaaagttctggaagcaatcctgaaacatggtaatgtcgaagaagcagtgaaaattgtcaaggaagtgacggaaaaactgtcgaagtatgaaatcccgccggaaaaactggtgatctacgaacaaattacccgcccgctgcatgaatataaagcgattggcccgcacgtggcagttgctaaacgtctggcagcccgcggtgtcaaagtgcgtccgggcatggtgatcggttatattgttctgcgtggcgatggtccgatcagtaaacgcgcgattctggccgaagaatttgatccgcgcaaacacaagtacgacgccgaatattacatcgaaaaccaggtgctgccggctgttctgcgtattctggaagcgttcggctatcgtaaagaagatctgcgctggcagaaaaccaagcaaacgggtctgaccgcatggctgaatgtgaaaaagaaataa

SEQ ID NO: 276 - DNA, 2328 bp, Artificial Sequence
  Synthetic
atgattctggacgctgactatattacggaaaatggcaagccggttgtgcgcatcttcaaaaaggaaaatggcgaattcaaggtggaatatgatcgcaactttgaaccgtatatttacgccctgctgaaagatgacagtgcaatcgaagaaattaaaaagatcaccgccgaacgccatggcaccgtggttcgtatcacgaaagcagaaaaggttgaacgtaaatttctgggtcgcccggtggaagtttggaaactgtatttcacgcatccgcaggatgtgccggccattcgtgacaaaatccgctctcacccggcagtcgtggatatttatgaatacgacatcccgtttgccaaacgttatctgattgataagggcctggttccgatggaaggtgacgaagaactgaaaatgctggcttttgatatcgaaaccctgtatcacgaaggcgaagaattcgcggaaggtccgattctgatgatctcatacgcagacgaatcggaagctcgcgtgattacctggaaaaaggttgatctgccgtatgttgacgctgtcagcacggaaaaagatatgattaaggcgtttctgcgtgttgtcaaagaaaaggatccggacgttctgatcacctataacggcgataattttgacttcgcttacctgaaaaagcgctgcgaaaaactgggtgtgaagttcattctgggccgtgacggttctgaaccgaaaatccagcgtatgggcgatcgctttgcagtcgacgtgaaaggtcgcattcatttcgatctgtatccggtgattcgtcgcaccatcaacctgccgacctatacgctggaagcggtctacgaagccatttttggccgtccgaaagaaaaggtgtatgccgaagaaatcgcacaagcttgggaaaccaatgaaggcctggaacgtgtcgctcgctatagcatggaagatgcgaaagtgacgtacgaactgggcaaggaatttttcccgatggaagcgcagctgtcacgcctgattggccaaccgctgtgggatgtgtcgcgtagctctaccggtaacctggttgaatggttcctgctgcgtaaagcgtatgaacgcaacgaactggctccgaataagccggatgaacgcgaactggttcgtcgccgtaacagctataccggcggttacgtcaaagaaccggaacgcggcctgtgggataatatcgtttatctggactttcgtagtctgtacccgtccattatcattacccataacgtgtcaccggacacgctgaatcgtgaaggctgcaaagaatatgatgaagccccgcaagtgggtcacaagttctgtaaagactttccgggcttcattccgtcgctgctgggtaacctgctggatgaacgccagaaaatcaagaaacgtatgaaggcaaccattgatccgctggaaaagaaactgctggactatcgtcaacgcgctatcaaaattctggcgaattcttattacggctattacgcgtatgcgcgtgcgcgctggtactgcaaagaatgtgccgaaagtgtgaccgcatggggccgcgaatatattgaaatgtccatccgtgaaatcgaagaaaagtacggtttcaaggttctgtacgcggataccgacggtttccacgcaacgatcccgggtgccgatgcagaaaccgtgaagaaaaaggcgatggaattcctgaagtacatcaacgctaagctgccgggtgcgctggaactggaatatgaaggcttctacaaacgtggctttttcgtgacgaaaaagaaatacgccgttatcgacgaagaaggcaaaattaccacgcgcggtctggaaatcgtgcgccgtgattggagtgaaattgccaaagaaacccaggcacgcgttctggaagcaatcctgcgtcatggtgacgtcgaagaagccgttcgcattgtcaaagatgtgacggaaaagctgtcgaaatatgaagtcccgccggaaaaactggtgatccatgaacaaattacccgtgaactgaaggattacaaagcgacgggcccgcacgttgcaattgctaaacgcctggcagcccgtggcatcaagattcgtccgggtaccgttatcagctatattgtcctgaaaggctctggtcgcatcggtgatcgtgctattccgtttgatgaattcgacccgacgaaacaccgttacgatgccgaatattacatcgaaaatcaggtgctgccggccgttgaacgcattctgaaagcatttggctataagaaagaagaactgcgctaccagaaaacccgtcaagtgggcctgggtgcgtggctgaagctgaaaggtaagaaataa

SEQ ID NO: 277 - DNA, 2322 bp, Artificial Sequence
  Synthetic
atgattctggacgctgactatattacggaaaatggcaagccggttgtgcgcatcttcaaaaaggaaaatggcgaattcaaggtggaatatgatcgcaactttgaaccgtatatttacgccctgctgaaagatgacagtgcaatcgaagaaattaaaaagatcaccgccgaacgccatggcaccgtggttcgtatcacgaaagcagaaaaggttgaacgtaaatttctgggtcgcccggtggaagtttggaaactgtatttcacgcatccgcaggatgtgccggccattcgtgacaaaatccgctctcacccggcagtcgtggatatttatgaatacgacatcccgtttgccaaacgttatctgattgataagggcctggttccgatggaaggtgacgaagaactgaaaatgctggcttttgatatcgaaaccctgtatcacgaaggcgaagaattcgcggaaggtccgattctgatgatctcatacgcagacgaatcggaagctcgcgtgattacctggaaaaaggttgatctgccgtatgttgacgctgtcagcacggaaaaagatatgattaaggcgtttctgcgtgttgtcaaagaaaaggatccggacgttctgatcacctataacggcgataattttgacttcgcttacctgaaaaagcgctgcgaaaaactgggtgtgaagttcattctgggccgtgacggttctgaaccgaaaatccagcgtatgggcgatcgctttgcagtcgacgtgaaaggtcgcattcatttcgatctgtatccggtgattcgtcgcaccatcaacctgccgacctatacgctggaagcggtctacgaagccatttttggccgtccgaaagaaaaggtgtatgccgaagaaatcgcacaagcttgggaaaccaatgaaggcctggaacgtgtcgctcgctatagcatggaagatgcgaaagtgacgtacgaactgggcaaggaatttttcccgatggaagcgcagctgtcacgcctgattggccaaccgctgtgggatgtgtcgcgtagctctaccggtaacctggttgaatggttcctgctgcgtaaagcgtatgaacgcaacgaactggctccgaataagccggatgaacgcgaactggttcgtcgccgtaacagctataccggcggttacgtcaaagaaccggaacgcggcctgtgggataatatcgtttatctggactttcgtagtctgtacccgtccattatcattacccataacgtgtcaccggacacgctgaatcgtgaaggctgcaaagaatatgatgaagccccgcaagtgggtcacaagttctgtaaagactttccgggcttcattccgtcgctgctgggtaacctgctggatgaacgccagaaaatcaagaaacgtatgaaggcaaccattgatccgctggaaaagaaactgctggactatcgtcaacgcgctatcaaaattctggcgaattcttattacggctattacgcgtatgcgcgtgcgcgctggtactgcaaagaatgtgccgaaagtgtgaccgcatggggccgcgaatatattgaaatgtccatccgtgaaatcgaagaaaagtacggtttcaaggttctgtacgcggataccgacggtttccacgcaacgatcccgggtgccgatgcagaaaccgtgaagaaaaaggcgatggaattcctgaagtacatcaacgctaagctgccgggtgcgctggaactggaatatgaaggcttctacaaacgtggctttttcgtgacgaaaaagaaatacgccgttatcgacgaagaaggcaaaattaccacgcgcggtctggaaatcgtgcgccgtgattggagtgaaattgccaaagaaacccaggcacgtgtcctggaagcaatcctgaaacatggtgatgtggaagaagcggttcgcattgtcaaagaagtgacggaaaagctgtcgaaatatgaagttccgccggaaaaactggtcatccatgaacaaattacccgcgatctgcgtgactacaaagccacgggtccgcacgtggcagttgcaaaacgtctggcagcccgtggcgtgaagattcgtccgggtaccgtgatcagttatattgttctgaaaggctccggtcgcatcggtgaccgtgctattccgtttgatgaattcgacccgacgaaacaccgttacgatgccgaatattacatcgaaaatcaggtcctgccggccgtggaacgcattctgaaagcatttggttatcgcaaggaagatctgcgttaccagaagaccaaacaagtcggcctgggtgcgtggctgaaagtgaaaaagtaa

SEQ ID NO: 278 - DNA, 2328 bp, Artificial Sequence
  Synthetic
atgattctggacgctgactatattacggaaaatggcaagccggttgtgcgcatcttcaaaaaggaaaatggcgaattcaaggtggaatatgatcgcaactttgaaccgtatatttacgccctgctgaaagatgacagtgcaatcgaagaaattaaaaagatcaccgccgaacgccatggcaccgtggttcgtatcacgaaagcagaaaaggttgaacgtaaatttctgggtcgcccggtggaagtttggaaactgtatttcacgcatccgcaggatgtgccggccattcgtgacaaaatccgctctcacccggcagtcgtggatatttatgaatacgacatcccgtttgccaaacgttatctgattgataagggcctggttccgatggaaggtgacgaagaactgaaaatgctggcttttgatatcgaaaccctgtatcacgaaggcgaagaattcgcggaaggtccgattctgatgatctcatacgcagacgaatcggaagctcgcgtgattacctggaaaaaggttgatctgccgtatgttgacgctgtcagcacggaaaaagatatgattaaggcgtttctgcgtgttgtcaaagaaaaggatccggacgttctgatcacctataacggcgataattttgacttcgcttacctgaaaaagcgctgcgaaaaactgggtgtgaagttcattctgggccgtgacggttctgaaccgaaaatccagcgtatgggcgatcgctttgcagtcgacgtgaaaggtcgcattcatttcgatctgtatccggtgattcgtcgcaccatcaacctgccgacctatacgctggaagcggtctacgaagccatttttggccgtccgaaagaaaaggtgtatgccgaagaaatcgcacaagcttgggaaaccaatgaaggcctggaacgtgtcgctcgctatagcatggaagatgcgaaagtgacgtacgaactgggcaaggaatttttcccgatggaagcgcagctgtcacgcctgattggccaaccgctgtgggatgtgtcgcgtagctctaccggtaacctggttgaatggttcctgctgcgtaaagcgtatgaacgcaacgaactggctccgaataagccggatgaacgcgaactggttcgtcgccgtaacagctataccggcggttacgtcaaagaaccggaacgcggcctgtgggataatatcgtttatctggactttcgtagtctgtacccgtccattatcattacccataacgtgtcaccggacacgctgaatcgtgaaggctgcaaagaatatgatgaagccccgcaagtgggtcacaagttctgtaaagactttccgggcttcattccgtcgctgctgggtaacctgctggatgaacgccagaaaatcaagaaacgtatgaaggcaaccattgatccgctggaaaagaaactgctggactatcgtcaacgcgctatcaaaattctggcgaattcttattacggctattacgcgtatgcgcgtgcgcgctggtactgcaaagaatgtgccgaaagtgtgaccgcatggggccgcgaatatattgaaatgtccatccgtgaaatcgaagaaaagtacggtttcaaggttctgtacgcggataccgacggtttccacgcaacgatcccgggtgccgatgcagaaaccgtgaagaaaaaggcgatggaattcctgaagtacatcaacgctaagctgccgggtgcgctggaactggaatatgaaggcttctacaaacgtggctttttcgtgacgaaaaagaaatacgccgttatcgacgaagaaggcaaaattaccacgcgcggtctggaaatcgtgcgccgtgattggagtgaaattgccaaagaaacccaggcacgtgtgctggaagctctgctgaaagatggcaatgttgaagaagcggtttccattgtcaaagaagtgacggaaaagctgggtaaatatgaagtcccgccggaaaaactggtgatccatgaacaaattacccgcgaactgaaggattacaaagcgacgggcccgcacgttgctatcgcgaaacgtctggcagcgcgtggcgtgaagattcgtccgggtaccgttatcagctatattgtcctgaaaggctctggtcgtatcggtgaccgcgcgattccgtttgatgaattcgacccgacgaaacatcgctacgatgcagaatattacatcgaaaaccaggttctgccggctgtcgaacgtattctgaaagcgtttggctatcgtgccgaagatctgcgctaccagaaaacccgtcaagtgggcctgggtgtttggctgcaaccgaaaggtaagaaataa

SEQ ID NO: 279 - DNA, 2325 bp, Artificial Sequence
  Synthetic
atgattctggacgctgactatattacggaaaatggcaagccggttgtgcgcatcttcaaaaaggaaaatggcgaattcaaggtggaatatgatcgcaactttgaaccgtatatttacgccctgctgaaagatgacagtgcaatcgaagaaattaaaaagatcaccgccgaacgccatggcaccgtggttcgtatcacgaaagcagaaaaggttgaacgtaaatttctgggtcgcccggtggaagtttggaaactgtatttcacgcatccgcaggatgtgccggccattcgtgacaaaatccgctctcacccggcagtcgtggatatttatgaatacgacatcccgtttgccaaacgttatctgattgataagggcctggttccgatggaaggtgacgaagaactgaaaatgctggcttttgatatcgaaaccctgtatcacgaaggcgaagaattcgcggaaggtccgattctgatgatctcatacgcagacgaatcggaagctcgcgtgattacctggaaaaaggttgatctgccgtatgttgacgctgtcagcacggaaaaagatatgattaaggcgtttctgcgtgttgtcaaagaaaaggatccggacgttctgatcacctataacggcgataattttgacttcgcttacctgaaaaagcgctgcgaaaaactgggtgtgaagttcattctgggccgtgacggttctgaaccgaaaatccagcgtatgggcgatcgctttgcagtcgacgtgaaaggtcgcattcatttcgatctgtatccggtgattcgtcgcaccatcaacctgccgacctatacgctggaagcggtctacgaagccatttttggccgtccgaaagaaaaggtgtatgccgaagaaatcgcacaagcttgggaaaccaatgaaggcctggaacgtgtcgctcgctatagcatggaagatgcgaaagtgacgtacgaactgggcaaggaatttttcccgatggaagcgcagctgtcacgcctgattggccaaccgctgtgggatgtgtcgcgtagctctaccggtaacctggttgaatggttcctgctgcgtaaagcgtatgaacgcaacgaactggctccgaataagccggatgaacgcgaactggttcgtcgccgtaacagctataccggcggttacgtcaaagaaccggaacgcggcctgtgggataatatcgtttatctggactttcgtagtctgtacccgtccattatcattacccataacgtgtcaccggacacgctgaatcgtgaaggctgcaaagaatatgatgaagccccgcaagtgggtcacaagttctgtaaagactttccgggcttcattccgtcgctgctgggtaacctgctggatgaacgccagaaaatcaagaaacgtatgaaggcaaccattgatccgctggaaaagaaactgctggactatcgtcaacgcgctatcaaaattctggcgaattcttattacggctattacgcgtatgcgcgtgcgcgctggtactgcaaagaatgtgccgaaagtgtgaccgcatggggccgcgaatatattgaaatgtccatccgtgaaatcgaagaaaagtacggtttcaaggttctgtacgcggataccgacggtttccacgcaacgatcccgggtgccgatgcagaaaccgtgaagaaaaaggcgatggaattcctgaagtacatcaacgctaagctgccgggtgcgctggaactggaatatgaaggcttctacaaacgtggctttttcgtgacgaaaaagaaatacgccgttatcgacgaagaaggcaaaattaccacgcgcggtctggaaatcgtgcgccgtgattggagtgaaattgccaaagaaacccaggcaaaggttctggaagcaattctgaaacatggtaacgtcgaagaagcggtcaagatcgtgaaagaagttaccgaaaaactgtcgaattatgaaattccggtcgaaaagctggtgatctacgaacaaattacgcgcccgctgaacgaatataaagccattggcccgcacgtggcagttgctaaacgtctggcggccaagggtatcaagattaaaccgggcatggtgattggttatgttgtcctgcgcggcgatggtccgatcagcaaacgtgcgatcgccatcgaagaattcgatggcaaaaagcataagtacgacgcagaatactacatcgaaaatcaggttctgccggccgtcgaacgtatcctgaaagcattcggttataagcgtgaagatctgcgctggcagaagaccaaacaagtgggcctgggtgcgtggctgaaagttaaaaagtcttaa

SEQ ID NO: 280 - DNA, 2328 bp, Artificial Sequence
  Synthetic
atgattctggacgctgactatattacggaaaatggcaagccggttgtgcgcatcttcaaaaaggaaaatggcgaattcaaggtggaatatgatcgcaactttgaaccgtatatttacgccctgctgaaagatgacagtgcaatcgaagaaattaaaaagatcaccgccgaacgccatggcaccgtggttcgtatcacgaaagcagaaaaggttgaacgtaaatttctgggtcgcccggtggaagtttggaaactgtatttcacgcatccgcaggatgtgccggccattcgtgacaaaatccgctctcacccggcagtcgtggatatttatgaatacgacatcccgtttgccaaacgttatctgattgataagggcctggttccgatggaaggtgacgaagaactgaaaatgctggcttttgatatcgaaaccctgtatcacgaaggcgaagaattcgcggaaggtccgattctgatgatctcatacgcagacgaatcggaagctcgcgtgattacctggaaaaaggttgatctgccgtatgttgacgctgtcagcacggaaaaagatatgattaaggcgtttctgcgtgttgtcaaagaaaaggatccggacgttctgatcacctataacggcgataattttgacttcgcttacctgaaaaagcgctgcgaaaaactgggtgtgaagttcattctgggccgtgacggttctgaaccgaaaatccagcgtatgggcgatcgctttgcagtcgacgtgaaaggtcgcattcatttcgatctgtatccggtgattcgtcgcaccatcaacctgccgacctatacgctggaagcggtctacgaagccatttttggccgtccgaaagaaaaggtgtatgccgaagaaatcgcacaagcttgggaaaccaatgaaggcctggaacgtgtcgctcgctatagcatggaagatgcgaaagtgacgtacgaactgggcaaggaatttttcccgatggaagcgcagctgtcacgcctgattggccaaccgctgtgggatgtgtcgcgtagctctaccggtaacctggttgaatggttcctgctgcgtaaagcgtatgaacgcaacgaactggctccgaataagccggatgaacgcgaactggttcgtcgccgtaacagctataccggcggttacgtcaaagaaccggaacgcggcctgtgggataatatcgtttatctggactttcgtagtctgtacccgtccattatcattacccataacgtgtcaccggacacgctgaatcgtgaaggctgcaaagaatatgatgaagccccgcaagtgggtcacaagttctgtaaagactttccgggcttcattccgtcgctgctgggtaacctgctggatgaacgccagaaaatcaagaaacgtatgaaggcaaccattgatccgctggaaaagaaactgctggactatcgtcaacgcgctatcaaaattctggcgaattcttattacggctattacgcgtatgcgcgtgcgcgctggtactgcaaagaatgtgccgaaagtgtgaccgcatggggccgcgaatatattgaaatgtccatccgtgaaatcgaagaaaagtacggtttcaaggttctgtacgcggataccgacggtttccacgcaacgatcccgggtgccgatgcagaaaccgtgaagaaaaaggcgatggaattcctgaagtacatcaacgctaagctgccgggtgcgctggaactggaatatgaaggcttctacaaacgtggctttttcgtgacgaaaaagaaatacgccgttatcgacgaagaaggcaaaattaccacgcgcggtctggaaatcgtgcgccgtgattggagtgaaattgccaaagaaacccaggcacgtgttctggaagcactgctgaaagatggtaatgtcgaagaagcagtgagtattgttaaagaagtcacggaaaaactgtccaagtatgaagtcccgccggaaaaactggtgattcatgaacaaatcacccgcgaactgaaagattacaaggcgacgggcccgcacgtggcaattgctaaacgtctggcagcgcgtggcgttaagatccgtccgggtaccgttattagctatatcgtcctgaaaggctctggtcgtattggtgaccgcgccatcccgtttgatgaattcgacccggctaaacaccgctacgatgcggaatattacattgaaaatcaggtcctgccggctgtggaacgtatcctgaaagcgtttggctatcgtaaggaagatctgcgctaccagaaaacccgtcaagtgggcctgggtgcgtggctgaaaccgaagggtaaaaagtaa

SEQ ID NO: 281 - DNA, 2328 bp, Artificial Sequence
  Synthetic
atgattctggacgctgactatattacggaaaatggcaagccggttgtgcgcatcttcaaaaaggaaaatggcgaattcaaggtggaatatgatcgcaactttgaaccgtatatttacgccctgctgaaagatgacagtgcaatcgaagaaattaaaaagatcaccgccgaacgccatggcaccgtggttcgtatcacgaaagcagaaaaggttgaacgtaaatttctgggtcgcccggtggaagtttggaaactgtatttcacgcatccgcaggatgtgccggccattcgtgacaaaatccgctctcacccggcagtcgtggatatttatgaatacgacatcccgtttgccaaacgttatctgattgataagggcctggttccgatggaaggtgacgaagaactgaaaatgctggcttttgatatcgaaaccctgtatcacgaaggcgaagaattcgcggaaggtccgattctgatgatctcatacgcagacgaatcggaagctcgcgtgattacctggaaaaaggttgatctgccgtatgttgacgctgtcagcacggaaaaagatatgattaaggcgtttctgcgtgttgtcaaagaaaaggatccggacgttctgatcacctataacggcgataattttgacttcgcttacctgaaaaagcgctgcgaaaaactgggtgtgaagttcattctgggccgtgacggttctgaaccgaaaatccagcgtatgggcgatcgctttgcagtcgacgtgaaaggtcgcattcatttcgatctgtatccggtgattcgtcgcaccatcaacctgccgacctatacgctggaagcggtctacgaagccatttttggccgtccgaaagaaaaggtgtatgccgaagaaatcgcacaagcttgggaaaccaatgaaggcctggaacgtgtcgctcgctatagcatggaagatgcgaaagtgacgtacgaactgggcaaggaatttttcccgatggaagcgcagctgtcacgcctgattggccaaccgctgtgggatgtgtcgcgtagctctaccggtaacctggttgaatggttcctgctgcgtaaagcgtatgaacgcaacgaactggctccgaataagccggatgaacgcgaactggttcgtcgccgtaacagctataccggcggttacgtcaaagaaccggaacgcggcctgtgggataatatcgtttatctggactttcgtagtctgtacccgtccattatcattacccataacgtgtcaccggacacgctgaatcgtgaaggctgcaaagaatatgatgaagccccgcaagtgggtcacaagttctgtaaagactttccgggcttcattccgtcgctgctgggtaacctgctggatgaacgccagaaaatcaagaaacgtatgaaggcaaccattgatccgctggaaaagaaactgctggactatcgtcaacgcgctatcaaaattctggcgaattcttattacggctattacgcgtatgcgcgtgcgcgctggtactgcaaagaatgtgccgaaagtgtgaccgcatggggccgcgaatatattgaaatgtccatccgtgaaatcgaagaaaagtacggtttcaaggttctgtacgcggataccgacggtttccacgcaacgatcccgggtgccgatgcagaaaccgtgaagaaaaaggcgatggaattcctgaagtacatcaacgctaagctgccgggtgcgctggaactggaatatgaaggcttctacaaacgtggctttttcgtgacgaaaaagaaatacgccgttatcgacgaagaaggcaaaattaccacgcgcggtctggaaatcgtgcgccgtgattggagtgaaattgccaaagaaacccaggcacgcgtcctggaagcaatcctgaaagatggtgacgtggaagaagccgtccgtattgtgaaagaagttacggaaaaactgtccaaatatgaagttccgccggaaaaactggtcatccatgaacaaattacccgcgaactgaaagattacaaagcgacgggcccgcacgtcgcaatcgctaaacgtctggcggcgcgtggcgtgaaaattcgtccgggtaccgtgatctcatatattgttctgaaaggctcgggtcgtatcggtgaccgcgctattccgtttgatgaattcgacccgaaaaaacacaaatacgatgcggaatactacatcgaaaaccaggttctgccggccgtcgaacgtattctgcgcgcatttggctaccgtaaagaagatctgcgttatcaaaaaaccaaacaagtgggtctgggtgcgtggctgaaaccgaaaggtaaaaaataa

SEQ ID NO: 282 - DNA, 2325 bp, Artificial Sequence
  Synthetic
atgattctggacgctgactatattacggaaaatggcaagccggttgtgcgcatcttcaaaaaggaaaatggcgaattcaaggtggaatatgatcgcaactttgaaccgtatatttacgccctgctgaaagatgacagtgcaatcgaagaaattaaaaagatcaccgccgaacgccatggcaccgtggttcgtatcacgaaagcagaaaaggttgaacgtaaatttctgggtcgcccggtggaagtttggaaactgtatttcacgcatccgcaggatgtgccggccattcgtgacaaaatccgctctcacccggcagtcgtggatatttatgaatacgacatcccgtttgccaaacgttatctgattgataagggcctggttccgatggaaggtgacgaagaactgaaaatgctggcttttgatatcgaaaccctgtatcacgaaggcgaagaattcgcggaaggtccgattctgatgatctcatacgcagacgaatcggaagctcgcgtgattacctggaaaaaggttgatctgccgtatgttgacgctgtcagcacggaaaaagatatgattaaggcgtttctgcgtgttgtcaaagaaaaggatccggacgttctgatcacctataacggcgataattttgacttcgcttacctgaaaaagcgctgcgaaaaactgggtgtgaagttcattctgggccgtgacggttctgaaccgaaaatccagcgtatgggcgatcgctttgcagtcgacgtgaaaggtcgcattcatttcgatctgtatccggtgattcgtcgcaccatcaacctgccgacctatacgctggaagcggtctacgaagccatttttggccgtccgaaagaaaaggtgtatgccgaagaaatcgcacaagcttgggaaaccaatgaaggcctggaacgtgtcgctcgctatagcatggaagatgcgaaagtgacgtacgaactgggcaaggaatttttcccgatggaagcgcagctgtcacgcctgattggccaaccgctgtgggatgtgtcgcgtagctctaccggtaacctggttgaatggttcctgctgcgtaaagcgtatgaacgcaacgaactggctccgaataagccggatgaacgcgaactggttcgtcgccgtaacagctataccggcggttacgtcaaagaaccggaacgcggcctgtgggataatatcgtttatctggactttcgtagtctgtacccgtccattatcattacccataacgtgtcaccggacacgctgaatcgtgaaggctgcaaagaatatgatgaagccccgcaagtgggtcacaagttctgtaaagactttccgggcttcattccgtcgctgctgggtaacctgctggatgaacgccagaaaatcaagaaacgtatgaaggcaaccattgatccgctggaaaagaaactgctggactatcgtcaacgcgctatcaaaattctggcgaattcttattacggctattacgcgtatgcgcgtgcgcgctggtactgcaaagaatgtgccgaaagtgtgaccgcatggggccgcgaatatattgaaatgtccatccgtgaaatcgaagaaaagtacggtttcaaggttctgtacgcggataccgacggtttccacgcaacgatcccgggtgccgatgcagaaaccgtgaagaaaaaggcgatggaattcctgaagtacatcaacgctaagctgccgggtgcgctggaactggaatatgaaggcttctacaaacgtggctttttcgtgacgaaaaagaaatacgccgttatcgacgaagaaggcaaaattaccacgcgcggtctggaaatcgtgcgccgtgattggagtgaaattgccaaagaaacccaggcacgtgttctggaagcaattctgaaacatggtaacgtcgaagaagcggtcaaaatcgtgaaagaagttacggaaaaactgtctaactacgaaattccgccggaaaaactggccatctacgaacaaattacccgcccgctgcatgaatataaagcaatcggtccgcacgtcgcagtggcaaaacgtctggcagcacgcggcgttaaagtcaaaccgggtatggtcatcggctatattgtgctgcgtggtgatggcccgatcagcaaccgcgcaattctggctgaagaatacgatctgaaaaaacacaaatacgacgccgaatattacatcgaaaatcaggttctgccggctgtcctgcgtattctggaagcgtttggctatcgtaaagaagatctgcgctggcagaaaacccgtcaaacgggtctgacctcatggctgaatattaaaaaatcgtaa

SEQ ID NO: 283 - DNA, 2325 bp, Artificial Sequence
  Synthetic
atgattctggacgctgactatattacggaaaatggcaagccggttgtgcgcatcttcaaaaaggaaaatggcgaattcaaggtggaatatgatcgcaactttgaaccgtatatttacgccctgctgaaagatgacagtgcaatcgaagaaattaaaaagatcaccgccgaacgccatggcaccgtggttcgtatcacgaaagcagaaaaggttgaacgtaaatttctgggtcgcccggtggaagtttggaaactgtatttcacgcatccgcaggatgtgccggccattcgtgacaaaatccgctctcacccggcagtcgtggatatttatgaatacgacatcccgtttgccaaacgttatctgattgataagggcctggttccgatggaaggtgacgaagaactgaaaatgctggcttttgatatcgaaaccctgtatcacgaaggcgaagaattcgcggaaggtccgattctgatgatctcatacgcagacgaatcggaagctcgcgtgattacctggaaaaaggttgatctgccgtatgttgacgctgtcagcacggaaaaagatatgattaaggcgtttctgcgtgttgtcaaagaaaaggatccggacgttctgatcacctataacggcgataattttgacttcgcttacctgaaaaagcgctgcgaaaaactgggtgtgaagttcattctgggccgtgacggttctgaaccgaaaatccagcgtatgggcgatcgctttgcagtcgacgtgaaaggtcgcattcatttcgatctgtatccggtgattcgtcgcaccatcaacctgccgacctatacgctggaagcggtctacgaagccatttttggccgtccgaaagaaaaggtgtatgccgaagaaatcgcacaagcttgggaaaccaatgaaggcctggaacgtgtcgctcgctatagcatggaagatgcgaaagtgacgtacgaactgggcaaggaatttttcccgatggaagcgcagctgtcacgcctgattggccaaccgctgtgggatgtgtcgcgtagctctaccggtaacctggttgaatggttcctgctgcgtaaagcgtatgaacgcaacgaactggctccgaataagccggatgaacgcgaactggttcgtcgccgtaacagctataccggcggttacgtcaaagaaccggaacgcggcctgtgggataatatcgtttatctggactttcgtagtctgtacccgtccattatcattacccataacgtgtcaccggacacgctgaatcgtgaaggctgcaaagaatatgatgaagccccgcaagtgggtcacaagttctgtaaagactttccgggcttcattccgtcgctgctgggtaacctgctggatgaacgccagaaaatcaagaaacgtatgaaggcaaccattgatccgctggaaaagaaactgctggactatcgtcaacgcgctatcaaaattctggcgaattcttattacggctattacgcgtatgcgcgtgcgcgctggtactgcaaagaatgtgccgaaagtgtgaccgcatggggccgcgaatatattgaaatgtccatccgtgaaatcgaagaaaagtacggtttcaaggttctgtacgcggataccgacggtttccacgcaacgatcccgggtgccgatgcagaaaccgtgaagaaaaaggcgatggaattcctgaagtacatcaacgctaagctgccgggtgcgctggaactggaatatgaaggcttctacaaacgtggctttttcgtgacgaaaaagaaatacgccgttatcgacgaagaaggcaaaattaccacgcgcggtctggaaatcgtgcgccgtgattggagtgaaattgccaaagaaacccaggcaaaagttctggaagcaatcctgaaacatggtaatgtcgaagaagcagtgaaaattgtcaaggaagtgacggaaaaactgtcgaagtatgaaatcccgccggaaaaactggtgatctacgaacaaattacccgcccgctgcatgaatataaagcgattggcccgcacgtggcagttgctaaacgtctggcagcccgcggtgtcaaagtgcgtccgggcatggtgatcggttatattgttctgcgtggcgatggtccgatcagtaaacgcgcgattctggccgaagaatttgatccgcgcaaacacaagtacgacgccgaatattacatcgaaaaccaggtgctgccggctgttctgcgtattctggaagcgttcggctatcgtaaagaagatctgcgctggcagaaaaccaagcaaacgggtctgaccgcatggctgaatgtgaaaaagaaataa

SEQ ID NO: 284 - DNA, 2328 bp, Artificial Sequence
  Synthetic
atgattctggatgctgattacattacggaagatggcaagccgattattcgcctgttcaaaaaggaaaacggtcgcttcaaggtggaatacgatcgtaactttcgcccgtatatttacgctctgctgaaagatgacagcgcgatcgatgacgtgcgtaaaattacctctgaacgccacggcaaggtggttcgtgtcatcgatgtggaaaaggttaaaaagaaattcctgggtcgcccgatcgaagtgtggaaactgtatttcgaacatccgcaggatgttccggctatgcgtgacaaaattcgcgaacacccggcggttatcgatatttttgaatatgacatcccgttcgctaaacgttacctgatcgataagggcctgattccgatggagggtaacgaagaactgacctttctggcggtggacattgaaacgctgtaccatgaaggcgaagaattcggcaaaggtccgattatcatgatcagctatgcagatgaagaaggtgctaaagtcatcacctggaagaaaattgacctgccgtatgtggaagtcgtggccaatgaacgtgaaatgattaagcgcctgatcaaagttattcgcgaaaaagatccggacgtcattatcacgtataacggcgataattttgacttcccgtacctgctgaagcgtgccgaaaaactgggcatgaagctgccgctgggtcgcgataacagtgaaccgaaaatgcagcgtctgggcgactccctggcagttgaaatcaaaggtcgcattcattttgacctgtttccggtgatccgtcgcaccattaatctgccgacctatacgctggaagcggtttacgaagccatcttcggcaagcaaaaggaaaaggtctacccgcacgaaatcgcagaagcttgggaaaccggcaaaggtctggaacgtgtcgccaagtatagtatggaagatgcaaaagtgacgtacgaactgggcaaggaatttttcccgatggaagcacagctggctcgcctggtgggccaaccgctgtgggacgtttcccgtagctctaccggtaatctggtggaatggtatctgctgcgtaaagcgtatgaacgcaacgaactggcaccgaataaaccgtccggccgcgaatacgatgaacgtcgcggcggttatgcgggcggttacgttaaagaaccggaaaagggtctgtgggaaaacatcgtctacctggattacaagagtctgtatccgtccattatcattacccataacgttagtccggacacgctgaatcgcgaaggctgcaaagaatacgatgtggcgccgcaggttggtcaccgtttttgtaaagactttccgggcttcattccgtccctgctgggtgatctgctggaagaacgtcagaaaatcaagcgcaaaatgaaggccaccattgatccgatcgaacgtcgcctgctggactatcgtcaacgcgcgatcaaaattctggccaacagctattacggctattacggttatgcgcgtgcccgctggtactgcaaagaatgtgcagaaagcgttacggcttggggccgcgaatacatcgaaatgtctatccgtgaaatcgaagaaaagtacggtttcaaggtgctgtacgctgataccgacggcttccatgcgacgattccgggtgaagatgccgaaaccatcaaaaagaaagcaatggaattcctgaagtacatcaactcaaagctgccgggcgccctggaactggaatatgaaggcttctaccgtcgcggctttttcgttacgaagaaaaagtacgcagtcattgacgaagaaggcaaaatcaccacgcgcggtctggaaattgtgcgtcgcgattggagtgaaattgccaaagaaacccaggcacgcgttctggaagcaatcctgcgtcatggtgacgtcgaagaagccgttcgcattgtcaaagatgtgacggaaaagctgtcgaaatatgaagtcccgccggaaaaactggtgatccatgaacaaattacccgtgaactgaaggattacaaagcgacgggcccgcacgttgcaattgctaaacgcctggcagcccgtggcatcaagattcgtccgggtaccgttatcagctatattgtcctgaaaggctctggtcgcatcggtgatcgtgctattccgtttgatgaattcgacccgacgaaacaccgttacgatgccgaatattacatcgaaaatcaggtgctgccggccgttgaacgcattctgaaagcatttggctataagaaagaagaactgcgctaccagaaaacccgtcaagtgggcctgggtgcgtggctgaagctgaaaggtaagaaataa

SEQ ID NO: 285 - DNA, 2322 bp, Artificial Sequence
  Synthetic
atgattctggatgctgattacattacggaagatggcaagccgattattcgcctgttcaaaaaggaaaacggtcgcttcaaggtggaatacgatcgtaactttcgcccgtatatttacgctctgctgaaagatgacagcgcgatcgatgacgtgcgtaaaattacctctgaacgccacggcaaggtggttcgtgtcatcgatgtggaaaaggttaaaaagaaattcctgggtcgcccgatcgaagtgtggaaactgtatttcgaacatccgcaggatgttccggctatgcgtgacaaaattcgcgaacacccggcggttatcgatatttttgaatatgacatcccgttcgctaaacgttacctgatcgataagggcctgattccgatggagggtaacgaagaactgacctttctggcggtggacattgaaacgctgtaccatgaaggcgaagaattcggcaaaggtccgattatcatgatcagctatgcagatgaagaaggtgctaaagtcatcacctggaagaaaattgacctgccgtatgtggaagtcgtggccaatgaacgtgaaatgattaagcgcctgatcaaagttattcgcgaaaaagatccggacgtcattatcacgtataacggcgataattttgacttcccgtacctgctgaagcgtgccgaaaaactgggcatgaagctgccgctgggtcgcgataacagtgaaccgaaaatgcagcgtctgggcgactccctggcagttgaaatcaaaggtcgcattcattttgacctgtttccggtgatccgtcgcaccattaatctgccgacctatacgctggaagcggtttacgaagccatcttcggcaagcaaaaggaaaaggtctacccgcacgaaatcgcagaagcttgggaaaccggcaaaggtctggaacgtgtcgccaagtatagtatggaagatgcaaaagtgacgtacgaactgggcaaggaatttttcccgatggaagcacagctggctcgcctggtgggccaaccgctgtgggacgtttcccgtagctctaccggtaatctggtggaatggtatctgctgcgtaaagcgtatgaacgcaacgaactggcaccgaataaaccgtccggccgcgaatacgatgaacgtcgcggcggttatgcgggcggttacgttaaagaaccggaaaagggtctgtgggaaaacatcgtctacctggattacaagagtctgtatccgtccattatcattacccataacgttagtccggacacgctgaatcgcgaaggctgcaaagaatacgatgtggcgccgcaggttggtcaccgtttttgtaaagactttccgggcttcattccgtccctgctgggtgatctgctggaagaacgtcagaaaatcaagcgcaaaatgaaggccaccattgatccgatcgaacgtcgcctgctggactatcgtcaacgcgcgatcaaaattctggccaacagctattacggctattacggttatgcgcgtgcccgctggtactgcaaagaatgtgcagaaagcgttacggcttggggccgcgaatacatcgaaatgtctatccgtgaaatcgaagaaaagtacggtttcaaggtgctgtacgctgataccgacggcttccatgcgacgattccgggtgaagatgccgaaaccatcaaaaagaaagcaatggaattcctgaagtacatcaactcaaagctgccgggcgccctggaactggaatatgaaggcttctaccgtcgcggctttttcgttacgaagaaaaagtacgcagtcattgacgaagaaggcaaaatcaccacgcgcggtctggaaattgtgcgtcgcgattggagtgaaattgccaaagaaacccaggcacgtgtcctggaagcaatcctgaaacatggtgatgtggaagaagcggttcgcattgtcaaagaagtgacggaaaagctgtcgaaatatgaagttccgccggaaaaactggtcatccatgaacaaattacccgcgatctgcgtgactacaaagccacgggtccgcacgtggcagttgcaaaacgtctggcagcccgtggcgtgaagattcgtccgggtaccgtgatcagttatattgttctgaaaggctccggtcgcatcggtgaccgtgctattccgtttgatgaattcgacccgacgaaacaccgttacgatgccgaatattacatcgaaaatcaggtcctgccggccgtggaacgcattctgaaagcatttggttatcgcaaggaagatctgcgttaccagaagaccaaacaagtcggcctgggtgcgtggctgaaagtgaaaaagtaa

SEQ ID NO: 286 - DNA, 2328 bp, Artificial Sequence
  Synthetic
atgattctggatgctgattacattacggaagatggcaagccgattattcgcctgttcaaaaaggaaaacggtcgcttcaaggtggaatacgatcgtaactttcgcccgtatatttacgctctgctgaaagatgacagcgcgatcgatgacgtgcgtaaaattacctctgaacgccacggcaaggtggttcgtgtcatcgatgtggaaaaggttaaaaagaaattcctgggtcgcccgatcgaagtgtggaaactgtatttcgaacatccgcaggatgttccggctatgcgtgacaaaattcgcgaacacccggcggttatcgatatttttgaatatgacatcccgttcgctaaacgttacctgatcgataagggcctgattccgatggagggtaacgaagaactgacctttctggcggtggacattgaaacgctgtaccatgaaggcgaagaattcggcaaaggtccgattatcatgatcagctatgcagatgaagaaggtgctaaagtcatcacctggaagaaaattgacctgccgtatgtggaagtcgtggccaatgaacgtgaaatgattaagcgcctgatcaaagttattcgcgaaaaagatccggacgtcattatcacgtataacggcgataattttgacttcccgtacctgctgaagcgtgccgaaaaactgggcatgaagctgccgctgggtcgcgataacagtgaaccgaaaatgcagcgtctgggcgactccctggcagttgaaatcaaaggtcgcattcattttgacctgtttccggtgatccgtcgcaccattaatctgccgacctatacgctggaagcggtttacgaagccatcttcggcaagcaaaaggaaaaggtctacccgcacgaaatcgcagaagcttgggaaaccggcaaaggtctggaacgtgtcgccaagtatagtatggaagatgcaaaagtgacgtacgaactgggcaaggaatttttcccgatggaagcacagctggctcgcctggtgggccaaccgctgtgggacgtttcccgtagctctaccggtaatctggtggaatggtatctgctgcgtaaagcgtatgaacgcaacgaactggcaccgaataaaccgtccggccgcgaatacgatgaacgtcgcggcggttatgcgggcggttacgttaaagaaccggaaaagggtctgtgggaaaacatcgtctacctggattacaagagtctgtatccgtccattatcattacccataacgttagtccggacacgctgaatcgcgaaggctgcaaagaatacgatgtggcgccgcaggttggtcaccgtttttgtaaagactttccgggcttcattccgtccctgctgggtgatctgctggaagaacgtcagaaaatcaagcgcaaaatgaaggccaccattgatccgatcgaacgtcgcctgctggactatcgtcaacgcgcgatcaaaattctggccaacagctattacggctattacggttatgcgcgtgcccgctggtactgcaaagaatgtgcagaaagcgttacggcttggggccgcgaatacatcgaaatgtctatccgtgaaatcgaagaaaagtacggtttcaaggtgctgtacgctgataccgacggcttccatgcgacgattccgggtgaagatgccgaaaccatcaaaaagaaagcaatggaattcctgaagtacatcaactcaaagctgccgggcgccctggaactggaatatgaaggcttctaccgtcgcggctttttcgttacgaagaaaaagtacgcagtcattgacgaagaaggcaaaatcaccacgcgcggtctggaaattgtgcgtcgcgattggagtgaaattgccaaagaaacccaggcacgtgtgctggaagctctgctgaaagatggcaatgttgaagaagcggtttccattgtcaaagaagtgacggaaaagctgggtaaatatgaagtcccgccggaaaaactggtgatccatgaacaaattacccgcgaactgaaggattacaaagcgacgggcccgcacgttgctatcgcgaaacgtctggcagcgcgtggcgtgaagattcgtccgggtaccgttatcagctatattgtcctgaaaggctctggtcgtatcggtgaccgcgcgattccgtttgatgaattcgacccgacgaaacatcgctacgatgcagaatattacatcgaaaaccaggttctgccggctgtcgaacgtattctgaaagcgtttggctatcgtgccgaagatctgcgctaccagaaaacccgtcaagtgggcctgggtgtttggctgcaaccgaaaggtaagaaataa

SEQ ID NO: 287 - DNA, 2325 bp, Artificial Sequence
  Synthetic
atgattctggatgctgattacattacggaagatggcaagccgattattcgcctgttcaaaaaggaaaacggtcgcttcaaggtggaatacgatcgtaactttcgcccgtatatttacgctctgctgaaagatgacagcgcgatcgatgacgtgcgtaaaattacctctgaacgccacggcaaggtggttcgtgtcatcgatgtggaaaaggttaaaaagaaattcctgggtcgcccgatcgaagtgtggaaactgtatttcgaacatccgcaggatgttccggctatgcgtgacaaaattcgcgaacacccggcggttatcgatatttttgaatatgacatcccgttcgctaaacgttacctgatcgataagggcctgattccgatggagggtaacgaagaactgacctttctggcggtggacattgaaacgctgtaccatgaaggcgaagaattcggcaaaggtccgattatcatgatcagctatgcagatgaagaaggtgctaaagtcatcacctggaagaaaattgacctgccgtatgtggaagtcgtggccaatgaacgtgaaatgattaagcgcctgatcaaagttattcgcgaaaaagatccggacgtcattatcacgtataacggcgataattttgacttcccgtacctgctgaagcgtgccgaaaaactgggcatgaagctgccgctgggtcgcgataacagtgaaccgaaaatgcagcgtctgggcgactccctggcagttgaaatcaaaggtcgcattcattttgacctgtttccggtgatccgtcgcaccattaatctgccgacctatacgctggaagcggtttacgaagccatcttcggcaagcaaaaggaaaaggtctacccgcacgaaatcgcagaagcttgggaaaccggcaaaggtctggaacgtgtcgccaagtatagtatggaagatgcaaaagtgacgtacgaactgggcaaggaatttttcccgatggaagcacagctggctcgcctggtgggccaaccgctgtgggacgtttcccgtagctctaccggtaatctggtggaatggtatctgctgcgtaaagcgtatgaacgcaacgaactggcaccgaataaaccgtccggccgcgaatacgatgaacgtcgcggcggttatgcgggcggttacgttaaagaaccggaaaagggtctgtgggaaaacatcgtctacctggattacaagagtctgtatccgtccattatcattacccataacgttagtccggacacgctgaatcgcgaaggctgcaaagaatacgatgtggcgccgcaggttggtcaccgtttttgtaaagactttccgggcttcattccgtccctgctgggtgatctgctggaagaacgtcagaaaatcaagcgcaaaatgaaggccaccattgatccgatcgaacgtcgcctgctggactatcgtcaacgcgcgatcaaaattctggccaacagctattacggctattacggttatgcgcgtgcccgctggtactgcaaagaatgtgcagaaagcgttacggcttggggccgcgaatacatcgaaatgtctatccgtgaaatcgaagaaaagtacggtttcaaggtgctgtacgctgataccgacggcttccatgcgacgattccgggtgaagatgccgaaaccatcaaaaagaaagcaatggaattcctgaagtacatcaactcaaagctgccgggcgccctggaactggaatatgaaggcttctaccgtcgcggctttttcgttacgaagaaaaagtacgcagtcattgacgaagaaggcaaaatcaccacgcgcggtctggaaattgtgcgtcgcgattggagtgaaattgccaaagaaacccaggcaaaggttctggaagcaattctgaaacatggtaacgtcgaagaagcggtcaagatcgtgaaagaagttaccgaaaaactgtcgaattatgaaattccggtcgaaaagctggtgatctacgaacaaattacgcgcccgctgaacgaatataaagccattggcccgcacgtggcagttgctaaacgtctggcggccaagggtatcaagattaaaccgggcatggtgattggttatgttgtcctgcgcggcgatggtccgatcagcaaacgtgcgatcgccatcgaagaattcgatggcaaaaagcataagtacgacgcagaatactacatcgaaaatcaggttctgccggccgtcgaacgtatcctgaaagcattcggttataagcgtgaagatctgcgctggcagaagaccaaacaagtgggcctgggtgcgtggctgaaagttaaaaagtcttaa

SEQ ID NO: 288 - DNA, 2328 bp, Artificial Sequence
  Synthetic
atgattctggatgctgattacattacggaagatggcaagccgattattcgcctgttcaaaaaggaaaacggtcgcttcaaggtggaatacgatcgtaactttcgcccgtatatttacgctctgctgaaagatgacagcgcgatcgatgacgtgcgtaaaattacctctgaacgccacggcaaggtggttcgtgtcatcgatgtggaaaaggttaaaaagaaattcctgggtcgcccgatcgaagtgtggaaactgtatttcgaacatccgcaggatgttccggctatgcgtgacaaaattcgcgaacacccggcggttatcgatatttttgaatatgacatcccgttcgctaaacgttacctgatcgataagggcctgattccgatggagggtaacgaagaactgacctttctggcggtggacattgaaacgctgtaccatgaaggcgaagaattcggcaaaggtccgattatcatgatcagctatgcagatgaagaaggtgctaaagtcatcacctggaagaaaattgacctgccgtatgtggaagtcgtggccaatgaacgtgaaatgattaagcgcctgatcaaagttattcgcgaaaaagatccggacgtcattatcacgtataacggcgataattttgacttcccgtacctgctgaagcgtgccgaaaaactgggcatgaagctgccgctgggtcgcgataacagtgaaccgaaaatgcagcgtctgggcgactccctggcagttgaaatcaaaggtcgcattcattttgacctgtttccggtgatccgtcgcaccattaatctgccgacctatacgctggaagcggtttacgaagccatcttcggcaagcaaaaggaaaaggtctacccgcacgaaatcgcagaagcttgggaaaccggcaaaggtctggaacgtgtcgccaagtatagtatggaagatgcaaaagtgacgtacgaactgggcaaggaatttttcccgatggaagcacagctggctcgcctggtgggccaaccgctgtgggacgtttcccgtagctctaccggtaatctggtggaatggtatctgctgcgtaaagcgtatgaacgcaacgaactggcaccgaataaaccgtccggccgcgaatacgatgaacgtcgcggcggttatgcgggcggttacgttaaagaaccggaaaagggtctgtgggaaaacatcgtctacctggattacaagagtctgtatccgtccattatcattacccataacgttagtccggacacgctgaatcgcgaaggctgcaaagaatacgatgtggcgccgcaggttggtcaccgtttttgtaaagactttccgggcttcattccgtccctgctgggtgatctgctggaagaacgtcagaaaatcaagcgcaaaatgaaggccaccattgatccgatcgaacgtcgcctgctggactatcgtcaacgcgcgatcaaaattctggccaacagctattacggctattacggttatgcgcgtgcccgctggtactgcaaagaatgtgcagaaagcgttacggcttggggccgcgaatacatcgaaatgtctatccgtgaaatcgaagaaaagtacggtttcaaggtgctgtacgctgataccgacggcttccatgcgacgattccgggtgaagatgccgaaaccatcaaaaagaaagcaatggaattcctgaagtacatcaactcaaagctgccgggcgccctggaactggaatatgaaggcttctaccgtcgcggctttttcgttacgaagaaaaagtacgcagtcattgacgaagaaggcaaaatcaccacgcgcggtctggaaattgtgcgtcgcgattggagtgaaattgccaaagaaacccaggcacgtgttctggaagcactgctgaaagatggtaatgtcgaagaagcagtgagtattgttaaagaagtcacggaaaaactgtccaagtatgaagtcccgccggaaaaactggtgattcatgaacaaatcacccgcgaactgaaagattacaaggcgacgggcccgcacgtggcaattgctaaacgtctggcagcgcgtggcgttaagatccgtccgggtaccgttattagctatatcgtcctgaaaggctctggtcgtattggtgaccgcgccatcccgtttgatgaattcgacccggctaaacaccgctacgatgcggaatattacattgaaaatcaggtcctgccggctgtggaacgtatcctgaaagcgtttggctatcgtaaggaagatctgcgctaccagaaaacccgtcaagtgggcctgggtgcgtggctgaaaccgaagggtaaaaagtaa

SEQ ID NO: 289 - DNA, 2328 bp, Artificial Sequence
  Synthetic
atgattctggatgctgattacattacggaagatggcaagccgattattcgcctgttcaaaaaggaaaacggtcgcttcaaggtggaatacgatcgtaactttcgcccgtatatttacgctctgctgaaagatgacagcgcgatcgatgacgtgcgtaaaattacctctgaacgccacggcaaggtggttcgtgtcatcgatgtggaaaaggttaaaaagaaattcctgggtcgcccgatcgaagtgtggaaactgtatttcgaacatccgcaggatgttccggctatgcgtgacaaaattcgcgaacacccggcggttatcgatatttttgaatatgacatcccgttcgctaaacgttacctgatcgataagggcctgattccgatggagggtaacgaagaactgacctttctggcggtggacattgaaacgctgtaccatgaaggcgaagaattcggcaaaggtccgattatcatgatcagctatgcagatgaagaaggtgctaaagtcatcacctggaagaaaattgacctgccgtatgtggaagtcgtggccaatgaacgtgaaatgattaagcgcctgatcaaagttattcgcgaaaaagatccggacgtcattatcacgtataacggcgataattttgacttcccgtacctgctgaagcgtgccgaaaaactgggcatgaagctgccgctgggtcgcgataacagtgaaccgaaaatgcagcgtctgggcgactccctggcagttgaaatcaaaggtcgcattcattttgacctgtttccggtgatccgtcgcaccattaatctgccgacctatacgctggaagcggtttacgaagccatcttcggcaagcaaaaggaaaaggtctacccgcacgaaatcgcagaagcttgggaaaccggcaaaggtctggaacgtgtcgccaagtatagtatggaagatgcaaaagtgacgtacgaactgggcaaggaatttttcccgatggaagcacagctggctcgcctggtgggccaaccgctgtgggacgtttcccgtagctctaccggtaatctggtggaatggtatctgctgcgtaaagcgtatgaacgcaacgaactggcaccgaataaaccgtccggccgcgaatacgatgaacgtcgcggcggttatgcgggcggttacgttaaagaaccggaaaagggtctgtgggaaaacatcgtctacctggattacaagagtctgtatccgtccattatcattacccataacgttagtccggacacgctgaatcgcgaaggctgcaaagaatacgatgtggcgccgcaggttggtcaccgtttttgtaaagactttccgggcttcattccgtccctgctgggtgatctgctggaagaacgtcagaaaatcaagcgcaaaatgaaggccaccattgatccgatcgaacgtcgcctgctggactatcgtcaacgcgcgatcaaaattctggccaacagctattacggctattacggttatgcgcgtgcccgctggtactgcaaagaatgtgcagaaagcgttacggcttggggccgcgaatacatcgaaatgtctatccgtgaaatcgaagaaaagtacggtttcaaggtgctgtacgctgataccgacggcttccatgcgacgattccgggtgaagatgccgaaaccatcaaaaagaaagcaatggaattcctgaagtacatcaactcaaagctgccgggcgccctggaactggaatatgaaggcttctaccgtcgcggctttttcgttacgaagaaaaagtacgcagtcattgacgaagaaggcaaaatcaccacgcgcggtctggaaattgtgcgtcgcgattggagtgaaattgccaaagaaacccaggcacgcgtcctggaagcaatcctgaaagatggtgacgtggaagaagccgtccgtattgtgaaagaagttacggaaaaactgtccaaatatgaagttccgccggaaaaactggtcatccatgaacaaattacccgcgaactgaaagattacaaagcgacgggcccgcacgtcgcaatcgctaaacgtctggcggcgcgtggcgtgaaaattcgtccgggtaccgtgatctcatatattgttctgaaaggctcgggtcgtatcggtgaccgcgctattccgtttgatgaattcgacccgaaaaaacacaaatacgatgcggaatactacatcgaaaaccaggttctgccggccgtcgaacgtattctgcgcgcatttggctaccgtaaagaagatctgcgttatcaaaaaaccaaacaagtgggtctgggtgcgtggctgaaaccgaaaggtaaaaaataa

SEQ ID NO: 290 - DNA, 2325 bp, Artificial Sequence
  Synthetic
atgattctggatgctgattacattacggaagatggcaagccgattattcgcctgttcaaaaaggaaaacggtcgcttcaaggtggaatacgatcgtaactttcgcccgtatatttacgctctgctgaaagatgacagcgcgatcgatgacgtgcgtaaaattacctctgaacgccacggcaaggtggttcgtgtcatcgatgtggaaaaggttaaaaagaaattcctgggtcgcccgatcgaagtgtggaaactgtatttcgaacatccgcaggatgttccggctatgcgtgacaaaattcgcgaacacccggcggttatcgatatttttgaatatgacatcccgttcgctaaacgttacctgatcgataagggcctgattccgatggagggtaacgaagaactgacctttctggcggtggacattgaaacgctgtaccatgaaggcgaagaattcggcaaaggtccgattatcatgatcagctatgcagatgaagaaggtgctaaagtcatcacctggaagaaaattgacctgccgtatgtggaagtcgtggccaatgaacgtgaaatgattaagcgcctgatcaaagttattcgcgaaaaagatccggacgtcattatcacgtataacggcgataattttgacttcccgtacctgctgaagcgtgccgaaaaactgggcatgaagctgccgctgggtcgcgataacagtgaaccgaaaatgcagcgtctgggcgactccctggcagttgaaatcaaaggtcgcattcattttgacctgtttccggtgatccgtcgcaccattaatctgccgacctatacgctggaagcggtttacgaagccatcttcggcaagcaaaaggaaaaggtctacccgcacgaaatcgcagaagcttgggaaaccggcaaaggtctggaacgtgtcgccaagtatagtatggaagatgcaaaagtgacgtacgaactgggcaaggaatttttcccgatggaagcacagctggctcgcctggtgggccaaccgctgtgggacgtttcccgtagctctaccggtaatctggtggaatggtatctgctgcgtaaagcgtatgaacgcaacgaactggcaccgaataaaccgtccggccgcgaatacgatgaacgtcgcggcggttatgcgggcggttacgttaaagaaccggaaaagggtctgtgggaaaacatcgtctacctggattacaagagtctgtatccgtccattatcattacccataacgttagtccggacacgctgaatcgcgaaggctgcaaagaatacgatgtggcgccgcaggttggtcaccgtttttgtaaagactttccgggcttcattccgtccctgctgggtgatctgctggaagaacgtcagaaaatcaagcgcaaaatgaaggccaccattgatccgatcgaacgtcgcctgctggactatcgtcaacgcgcgatcaaaattctggccaacagctattacggctattacggttatgcgcgtgcccgctggtactgcaaagaatgtgcagaaagcgttacggcttggggccgcgaatacatcgaaatgtctatccgtgaaatcgaagaaaagtacggtttcaaggtgctgtacgctgataccgacggcttccatgcgacgattccgggtgaagatgccgaaaccatcaaaaagaaagcaatggaattcctgaagtacatcaactcaaagctgccgggcgccctggaactggaatatgaaggcttctaccgtcgcggctttttcgttacgaagaaaaagtacgcagtcattgacgaagaaggcaaaatcaccacgcgcggtctggaaattgtgcgtcgcgattggagtgaaattgccaaagaaacccaggcacgtgttctggaagcaattctgaaacatggtaacgtcgaagaagcggtcaaaatcgtgaaagaagttacggaaaaactgtctaactacgaaattccgccggaaaaactggccatctacgaacaaattacccgcccgctgcatgaatataaagcaatcggtccgcacgtcgcagtggcaaaacgtctggcagcacgcggcgttaaagtcaaaccgggtatggtcatcggctatattgtgctgcgtggtgatggcccgatcagcaaccgcgcaattctggctgaagaatacgatctgaaaaaacacaaatacgacgccgaatattacatcgaaaatcaggttctgccggctgtcctgcgtattctggaagcgtttggctatcgtaaagaagatctgcgctggcagaaaacccgtcaaacgggtctgacctcatggctgaatattaaaaaatcgtaa

SEQ ID NO: 291 - DNA, 2325 bp, Artificial Sequence
  Synthetic
atgattctggatgctgattacattacggaagatggcaagccgattattcgcctgttcaaaaaggaaaacggtcgcttcaaggtggaatacgatcgtaactttcgcccgtatatttacgctctgctgaaagatgacagcgcgatcgatgacgtgcgtaaaattacctctgaacgccacggcaaggtggttcgtgtcatcgatgtggaaaaggttaaaaagaaattcctgggtcgcccgatcgaagtgtggaaactgtatttcgaacatccgcaggatgttccggctatgcgtgacaaaattcgcgaacacccggcggttatcgatatttttgaatatgacatcccgttcgctaaacgttacctgatcgataagggcctgattccgatggagggtaacgaagaactgacctttctggcggtggacattgaaacgctgtaccatgaaggcgaagaattcggcaaaggtccgattatcatgatcagctatgcagatgaagaaggtgctaaagtcatcacctggaagaaaattgacctgccgtatgtggaagtcgtggccaatgaacgtgaaatgattaagcgcctgatcaaagttattcgcgaaaaagatccggacgtcattatcacgtataacggcgataattttgacttcccgtacctgctgaagcgtgccgaaaaactgggcatgaagctgccgctgggtcgcgataacagtgaaccgaaaatgcagcgtctgggcgactccctggcagttgaaatcaaaggtcgcattcattttgacctgtttccggtgatccgtcgcaccattaatctgccgacctatacgctggaagcggtttacgaagccatcttcggcaagcaaaaggaaaaggtctacccgcacgaaatcgcagaagcttgggaaaccggcaaaggtctggaacgtgtcgccaagtatagtatggaagatgcaaaagtgacgtacgaactgggcaaggaatttttcccgatggaagcacagctggctcgcctggtgggccaaccgctgtgggacgtttcccgtagctctaccggtaatctggtggaatggtatctgctgcgtaaagcgtatgaacgcaacgaactggcaccgaataaaccgtccggccgcgaatacgatgaacgtcgcggcggttatgcgggcggttacgttaaagaaccggaaaagggtctgtgggaaaacatcgtctacctggattacaagagtctgtatccgtccattatcattacccataacgttagtccggacacgctgaatcgcgaaggctgcaaagaatacgatgtggcgccgcaggttggtcaccgtttttgtaaagactttccgggcttcattccgtccctgctgggtgatctgctggaagaacgtcagaaaatcaagcgcaaaatgaaggccaccattgatccgatcgaacgtcgcctgctggactatcgtcaacgcgcgatcaaaattctggccaacagctattacggctattacggttatgcgcgtgcccgctggtactgcaaagaatgtgcagaaagcgttacggcttggggccgcgaatacatcgaaatgtctatccgtgaaatcgaagaaaagtacggtttcaaggtgctgtacgctgataccgacggcttccatgcgacgattccgggtgaagatgccgaaaccatcaaaaagaaagcaatggaattcctgaagtacatcaactcaaagctgccgggcgccctggaactggaatatgaaggcttctaccgtcgcggctttttcgttacgaagaaaaagtacgcagtcattgacgaagaaggcaaaatcaccacgcgcggtctggaaattgtgcgtcgcgattggagtgaaattgccaaagaaacccaggcaaaagttctggaagcaatcctgaaacatggtaatgtcgaagaagcagtgaaaattgtcaaggaagtgacggaaaaactgtcgaagtatgaaatcccgccggaaaaactggtgatctacgaacaaattacccgcccgctgcatgaatataaagcgattggcccgcacgtggcagttgctaaacgtctggcagcccgcggtgtcaaagtgcgtccgggcatggtgatcggttatattgttctgcgtggcgatggtccgatcagtaaacgcgcgattctggccgaagaatttgatccgcgcaaacacaagtacgacgccgaatattacatcgaaaaccaggtgctgccggctgttctgcgtattctggaagcgttcggctatcgtaaagaagatctgcgctggcagaaaaccaagcaaacgggtctgaccgcatggctgaatgtgaaaaagaaataa

SEQ ID NO: 292 - DNA, 2331 bp, Artificial Sequence
  Synthetic
atgattctggatgctgattacattacggaagatggcaagccgattattcgcctgttcaaaaaggaaaacggtcgcttcaaggtggaatacgatcgtaactttcgcccgtatatttacgctctgctgaaagatgacagcgcgatcgatgacgtgcgtaaaattacctctgaacgccacggcaaggtggttcgtgtcatcgatgtggaaaaggttaaaaagaaattcctgggtcgcccgatcgaagtgtggaaactgtatttcgaacatccgcaggatgttccggctatgcgtgacaaaattcgcgaacacccggcggttatcgatatttttgaatatgacatcccgttcgctaaacgttacctgatcgataagggcctgattccgatggagggtaacgaagaactgacctttctggcggtggacattgaaacgctgtaccatgaaggcgaagaattcggcaaaggtccgattatcatgatcagctatgcagatgaagaaggtgctaaagtcatcacctggaagaaaattgacctgccgtatgtggaagtcgtggccaatgaacgtgaaatgattaagcgcctgatcaaagttattcgcgaaaaagatccggacgtcattatcacgtataacggcgataattttgacttcccgtacctgctgaagcgtgccgaaaaactgggcatgaagctgccgctgggtcgcgataacagtgaaccgaaaatgcagcgtctgggcgactccctggcagttgaaatcaaaggtcgcattcattttgacctgtttccggtgatccgtcgcaccattaatctgccgacctatacgctggaagcggtttacgaagccatcttcggcaagcaaaaggaaaaggtctacccgcacgaaatcgcagaagcttgggaaaccggcaaaggtctggaacgtgtcgccaagtatagtatggaagatgcaaaagtgacgtacgaactgggcaaggaatttttcccgatggaagcacagctggctcgcctggtgggccaaccgctgtgggacgtttcccgtagctctaccggtaatctggtggaatggtatctgctgcgtaaagcgtatgaacgcaacgaactggcgccgaataaaccggatgaacgcgaatatgaacgtcgcctgcgtgaaagttatgaaggcggttacgttaaagaaccggaacgcggcctgtgggaaggtattgtgtcactggattttcgtagtctgtacccgtccattatcattacccataacgtttcgccggatacgctgaataaagaaggctgcggtgaatatgacgaagccccggaagtgggtcaccgcttctgtaaagattttccgggcttcattccgtcactgctgggttcgctgctggaagaacgccagaagatcaagaaacgtatgaaggaatctaaggatccggtggaacgcaaactgctggactatcgtcaacgcgcgatcaagattctggccaacagcttttatggctattacggttacgcgaaagcccgttggtactgcaaggaatgtgcagaaagcgtgaccgcttggggccgccagtatattgaactggtccgtcgcgaactggaagaacgtggttttaaagtgctgtatatcgataccgacggcctgtacgccacgattccgggtgaaaagaactgggaagaaatcaagcgtcgcgcactggaatttgttaactacatcaattccaaactgccgggcattctggaactggaatatgaaggcttctacacccgtggctttttcgtgacgaagaaaaagtatgcgctgatcgatgaagaaggcaaaattgtcacccgtggtctggaaatcgtgcgtcgcgattggagtgaaattgccaaagaaacccaggcacgcgttctggaagcaatcctgcgtcatggtgacgtcgaagaagccgttcgcattgtcaaagatgtgacggaaaagctgtcgaaatatgaagtcccgccggaaaaactggtgatccatgaacaaattacccgtgaactgaaggattacaaagcgacgggcccgcacgttgcaattgctaaacgcctggcagcccgtggcatcaagattcgtccgggtaccgttatcagctatattgtcctgaaaggctctggtcgcatcggtgatcgtgctattccgtttgatgaattcgacccgacgaaacaccgttacgatgccgaatattacatcgaaaatcaggtgctgccggccgttgaacgcattctgaaagcatttggctataagaaagaagaactgcgctaccagaaaacccgtcaagtgggcctgggtgcgtggctgaagctgaaaggtaagaaataa

SEQ ID NO: 293 - DNA, 2325 bp, Artificial Sequence
  Synthetic
atgattctggatgctgattacattacggaagatggcaagccgattattcgcctgttcaaaaaggaaaacggtcgcttcaaggtggaatacgatcgtaactttcgcccgtatatttacgctctgctgaaagatgacagcgcgatcgatgacgtgcgtaaaattacctctgaacgccacggcaaggtggttcgtgtcatcgatgtggaaaaggttaaaaagaaattcctgggtcgcccgatcgaagtgtggaaactgtatttcgaacatccgcaggatgttccggctatgcgtgacaaaattcgcgaacacccggcggttatcgatatttttgaatatgacatcccgttcgctaaacgttacctgatcgataagggcctgattccgatggagggtaacgaagaactgacctttctggcggtggacattgaaacgctgtaccatgaaggcgaagaattcggcaaaggtccgattatcatgatcagctatgcagatgaagaaggtgctaaagtcatcacctggaagaaaattgacctgccgtatgtggaagtcgtggccaatgaacgtgaaatgattaagcgcctgatcaaagttattcgcgaaaaagatccggacgtcattatcacgtataacggcgataattttgacttcccgtacctgctgaagcgtgccgaaaaactgggcatgaagctgccgctgggtcgcgataacagtgaaccgaaaatgcagcgtctgggcgactccctggcagttgaaatcaaaggtcgcattcattttgacctgtttccggtgatccgtcgcaccattaatctgccgacctatacgctggaagcggtttacgaagccatcttcggcaagcaaaaggaaaaggtctacccgcacgaaatcgcagaagcttgggaaaccggcaaaggtctggaacgtgtcgccaagtatagtatggaagatgcaaaagtgacgtacgaactgggcaaggaatttttcccgatggaagcacagctggctcgcctggtgggccaaccgctgtgggacgtttcccgtagctctaccggtaatctggtggaatggtatctgctgcgtaaagcgtatgaacgcaacgaactggcgccgaataaaccggatgaacgcgaatatgaacgtcgcctgcgtgaaagttatgaaggcggttacgttaaagaaccggaacgcggcctgtgggaaggtattgtgtcactggattttcgtagtctgtacccgtccattatcattacccataacgtttcgccggatacgctgaataaagaaggctgcggtgaatatgacgaagccccggaagtgggtcaccgcttctgtaaagattttccgggcttcattccgtcactgctgggttcgctgctggaagaacgccagaagatcaagaaacgtatgaaggaatctaaggatccggtggaacgcaaactgctggactatcgtcaacgcgcgatcaagattctggccaacagcttttatggctattacggttacgcgaaagcccgttggtactgcaaggaatgtgcagaaagcgtgaccgcttggggccgccagtatattgaactggtccgtcgcgaactggaagaacgtggttttaaagtgctgtatatcgataccgacggcctgtacgccacgattccgggtgaaaagaactgggaagaaatcaagcgtcgcgcactggaatttgttaactacatcaattccaaactgccgggcattctggaactggaatatgaaggcttctacacccgtggctttttcgtgacgaagaaaaagtatgcgctgatcgatgaagaaggcaaaattgtcacccgtggtctggaaatcgtgcgtcgcgattggagtgaaattgccaaagaaacccaggcacgtgtcctggaagcaatcctgaaacatggtgatgtggaagaagcggttcgcattgtcaaagaagtgacggaaaagctgtcgaaatatgaagttccgccggaaaaactggtcatccatgaacaaattacccgcgatctgcgtgactacaaagccacgggtccgcacgtggcagttgcaaaacgtctggcagcccgtggcgtgaagattcgtccgggtaccgtgatcagttatattgttctgaaaggctccggtcgcatcggtgaccgtgctattccgtttgatgaattcgacccgacgaaacaccgttacgatgccgaatattacatcgaaaatcaggtcctgccggccgtggaacgcattctgaaagcatttggttatcgcaaggaagatctgcgttaccagaagaccaaacaagtcggcctgggtgcgtggctgaaagtgaaaaagtaa

SEQ ID NO: 294 - DNA, 2331 bp, Artificial Sequence
  Synthetic
atgattctggatgctgattacattacggaagatggcaagccgattattcgcctgttcaaaaaggaaaacggtcgcttcaaggtggaatacgatcgtaactttcgcccgtatatttacgctctgctgaaagatgacagcgcgatcgatgacgtgcgtaaaattacctctgaacgccacggcaaggtggttcgtgtcatcgatgtggaaaaggttaaaaagaaattcctgggtcgcccgatcgaagtgtggaaactgtatttcgaacatccgcaggatgttccggctatgcgtgacaaaattcgcgaacacccggcggttatcgatatttttgaatatgacatcccgttcgctaaacgttacctgatcgataagggcctgattccgatggagggtaacgaagaactgacctttctggcggtggacattgaaacgctgtaccatgaaggcgaagaattcggcaaaggtccgattatcatgatcagctatgcagatgaagaaggtgctaaagtcatcacctggaagaaaattgacctgccgtatgtggaagtcgtggccaatgaacgtgaaatgattaagcgcctgatcaaagttattcgcgaaaaagatccggacgtcattatcacgtataacggcgataattttgacttcccgtacctgctgaagcgtgccgaaaaactgggcatgaagctgccgctgggtcgcgataacagtgaaccgaaaatgcagcgtctgggcgactccctggcagttgaaatcaaaggtcgcattcattttgacctgtttccggtgatccgtcgcaccattaatctgccgacctatacgctggaagcggtttacgaagccatcttcggcaagcaaaaggaaaaggtctacccgcacgaaatcgcagaagcttgggaaaccggcaaaggtctggaacgtgtcgccaagtatagtatggaagatgcaaaagtgacgtacgaactgggcaaggaatttttcccgatggaagcacagctggctcgcctggtgggccaaccgctgtgggacgtttcccgtagctctaccggtaatctggtggaatggtatctgctgcgtaaagcgtatgaacgcaacgaactggcgccgaataaaccggatgaacgcgaatatgaacgtcgcctgcgtgaaagttatgaaggcggttacgttaaagaaccggaacgcggcctgtgggaaggtattgtgtcactggattttcgtagtctgtacccgtccattatcattacccataacgtttcgccggatacgctgaataaagaaggctgcggtgaatatgacgaagccccggaagtgggtcaccgcttctgtaaagattttccgggcttcattccgtcactgctgggttcgctgctggaagaacgccagaagatcaagaaacgtatgaaggaatctaaggatccggtggaacgcaaactgctggactatcgtcaacgcgcgatcaagattctggccaacagcttttatggctattacggttacgcgaaagcccgttggtactgcaaggaatgtgcagaaagcgtgaccgcttggggccgccagtatattgaactggtccgtcgcgaactggaagaacgtggttttaaagtgctgtatatcgataccgacggcctgtacgccacgattccgggtgaaaagaactgggaagaaatcaagcgtcgcgcactggaatttgttaactacatcaattccaaactgccgggcattctggaactggaatatgaaggcttctacacccgtggctttttcgtgacgaagaaaaagtatgcgctgatcgatgaagaaggcaaaattgtcacccgtggtctggaaatcgtgcgtcgcgattggagtgaaattgccaaagaaacccaggcacgtgtgctggaagctctgctgaaagatggcaatgttgaagaagcggtttccattgtcaaagaagtgacggaaaagctgggtaaatatgaagtcccgccggaaaaactggtgatccatgaacaaattacccgcgaactgaaggattacaaagcgacgggcccgcacgttgctatcgcgaaacgtctggcagcgcgtggcgtgaagattcgtccgggtaccgttatcagctatattgtcctgaaaggctctggtcgtatcggtgaccgcgcgattccgtttgatgaattcgacccgacgaaacatcgctacgatgcagaatattacatcgaaaaccaggttctgccggctgtcgaacgtattctgaaagcgtttggctatcgtgccgaagatctgcgctaccagaaaacccgtcaagtgggcctgggtgtttggctgcaaccgaaaggtaagaaataa

SEQ ID NO: 295 - DNA, 2328 bp, Artificial Sequence
  Synthetic
atgattctggatgctgattacattacggaagatggcaagccgattattcgcctgttcaaaaaggaaaacggtcgcttcaaggtggaatacgatcgtaactttcgcccgtatatttacgctctgctgaaagatgacagcgcgatcgatgacgtgcgtaaaattacctctgaacgccacggcaaggtggttcgtgtcatcgatgtggaaaaggttaaaaagaaattcctgggtcgcccgatcgaagtgtggaaactgtatttcgaacatccgcaggatgttccggctatgcgtgacaaaattcgcgaacacccggcggttatcgatatttttgaatatgacatcccgttcgctaaacgttacctgatcgataagggcctgattccgatggagggtaacgaagaactgacctttctggcggtggacattgaaacgctgtaccatgaaggcgaagaattcggcaaaggtccgattatcatgatcagctatgcagatgaagaaggtgctaaagtcatcacctggaagaaaattgacctgccgtatgtggaagtcgtggccaatgaacgtgaaatgattaagcgcctgatcaaagttattcgcgaaaaagatccggacgtcattatcacgtataacggcgataattttgacttcccgtacctgctgaagcgtgccgaaaaactgggcatgaagctgccgctgggtcgcgataacagtgaaccgaaaatgcagcgtctgggcgactccctggcagttgaaatcaaaggtcgcattcattttgacctgtttccggtgatccgtcgcaccattaatctgccgacctatacgctggaagcggtttacgaagccatcttcggcaagcaaaaggaaaaggtctacccgcacgaaatcgcagaagcttgggaaaccggcaaaggtctggaacgtgtcgccaagtatagtatggaagatgcaaaagtgacgtacgaactgggcaaggaatttttcccgatggaagcacagctggctcgcctggtgggccaaccgctgtgggacgtttcccgtagctctaccggtaatctggtggaatggtatctgctgcgtaaagcgtatgaacgcaacgaactggcgccgaataaaccggatgaacgcgaatatgaacgtcgcctgcgtgaaagttatgaaggcggttacgttaaagaaccggaacgcggcctgtgggaaggtattgtgtcactggattttcgtagtctgtacccgtccattatcattacccataacgtttcgccggatacgctgaataaagaaggctgcggtgaatatgacgaagccccggaagtgggtcaccgcttctgtaaagattttccgggcttcattccgtcactgctgggttcgctgctggaagaacgccagaagatcaagaaacgtatgaaggaatctaaggatccggtggaacgcaaactgctggactatcgtcaacgcgcgatcaagattctggccaacagcttttatggctattacggttacgcgaaagcccgttggtactgcaaggaatgtgcagaaagcgtgaccgcttggggccgccagtatattgaactggtccgtcgcgaactggaagaacgtggttttaaagtgctgtatatcgataccgacggcctgtacgccacgattccgggtgaaaagaactgggaagaaatcaagcgtcgcgcactggaatttgttaactacatcaattccaaactgccgggcattctggaactggaatatgaaggcttctacacccgtggctttttcgtgacgaagaaaaagtatgcgctgatcgatgaagaaggcaaaattgtcacccgtggtctggaaatcgtgcgtcgcgattggagtgaaattgccaaagaaacccaggcaaaggttctggaagcaattctgaaacatggtaacgtcgaagaagcggtcaagatcgtgaaagaagttaccgaaaaactgtcgaattatgaaattccggtcgaaaagctggtgatctacgaacaaattacgcgcccgctgaacgaatataaagccattggcccgcacgtggcagttgctaaacgtctggcggccaagggtatcaagattaaaccgggcatggtgattggttatgttgtcctgcgcggcgatggtccgatcagcaaacgtgcgatcgccatcgaagaattcgatggcaaaaagcataagtacgacgcagaatactacatcgaaaatcaggttctgccggccgtcgaacgtatcctgaaagcattcggttataagcgtgaagatctgcgctggcagaagaccaaacaagtgggcctgggtgcgtggctgaaagttaaaaagtcttaa

SEQ ID NO: 296 - DNA, 2331 bp, Artificial Sequence
  Synthetic
atgattctggatgctgattacattacggaagatggcaagccgattattcgcctgttcaaaaaggaaaacggtcgcttcaaggtggaatacgatcgtaactttcgcccgtatatttacgctctgctgaaagatgacagcgcgatcgatgacgtgcgtaaaattacctctgaacgccacggcaaggtggttcgtgtcatcgatgtggaaaaggttaaaaagaaattcctgggtcgcccgatcgaagtgtggaaactgtatttcgaacatccgcaggatgttccggctatgcgtgacaaaattcgcgaacacccggcggttatcgatatttttgaatatgacatcccgttcgctaaacgttacctgatcgataagggcctgattccgatggagggtaacgaagaactgacctttctggcggtggacattgaaacgctgtaccatgaaggcgaagaattcggcaaaggtccgattatcatgatcagctatgcagatgaagaaggtgctaaagtcatcacctggaagaaaattgacctgccgtatgtggaagtcgtggccaatgaacgtgaaatgattaagcgcctgatcaaagttattcgcgaaaaagatccggacgtcattatcacgtataacggcgataattttgacttcccgtacctgctgaagcgtgccgaaaaactgggcatgaagctgccgctgggtcgcgataacagtgaaccgaaaatgcagcgtctgggcgactccctggcagttgaaatcaaaggtcgcattcattttgacctgtttccggtgatccgtcgcaccattaatctgccgacctatacgctggaagcggtttacgaagccatcttcggcaagcaaaaggaaaaggtctacccgcacgaaatcgcagaagcttgggaaaccggcaaaggtctggaacgtgtcgccaagtatagtatggaagatgcaaaagtgacgtacgaactgggcaaggaatttttcccgatggaagcacagctggctcgcctggtgggccaaccgctgtgggacgtttcccgtagctctaccggtaatctggtggaatggtatctgctgcgtaaagcgtatgaacgcaacgaactggcgccgaataaaccggatgaacgcgaatatgaacgtcgcctgcgtgaaagttatgaaggcggttacgttaaagaaccggaacgcggcctgtgggaaggtattgtgtcactggattttcgtagtctgtacccgtccattatcattacccataacgtttcgccggatacgctgaataaagaaggctgcggtgaatatgacgaagccccggaagtgggtcaccgcttctgtaaagattttccgggcttcattccgtcactgctgggttcgctgctggaagaacgccagaagatcaagaaacgtatgaaggaatctaaggatccggtggaacgcaaactgctggactatcgtcaacgcgcgatcaagattctggccaacagcttttatggctattacggttacgcgaaagcccgttggtactgcaaggaatgtgcagaaagcgtgaccgcttggggccgccagtatattgaactggtccgtcgcgaactggaagaacgtggttttaaagtgctgtatatcgataccgacggcctgtacgccacgattccgggtgaaaagaactgggaagaaatcaagcgtcgcgcactggaatttgttaactacatcaattccaaactgccgggcattctggaactggaatatgaaggcttctacacccgtggctttttcgtgacgaagaaaaagtatgcgctgatcgatgaagaaggcaaaattgtcacccgtggtctggaaatcgtgcgtcgcgattggagtgaaattgccaaagaaacccaggcacgtgttctggaagcactgctgaaagatggtaatgtcgaagaagcagtgagtattgttaaagaagtcacggaaaaactgtccaagtatgaagtcccgccggaaaaactggtgattcatgaacaaatcacccgcgaactgaaagattacaaggcgacgggcccgcacgtggcaattgctaaacgtctggcagcgcgtggcgttaagatccgtccgggtaccgttattagctatatcgtcctgaaaggctctggtcgtattggtgaccgcgccatcccgtttgatgaattcgacccggctaaacaccgctacgatgcggaatattacattgaaaatcaggtcctgccggctgtggaacgtatcctgaaagcgtttggctatcgtaaggaagatctgcgctaccagaaaacccgtcaagtgggcctgggtgcgtggctgaaaccgaagggtaaaaagtaa

SEQ ID NO: 297 - DNA, 2331 bp, Artificial Sequence
  Synthetic
atgattctggatgctgattacattacggaagatggcaagccgattattcgcctgttcaaaaaggaaaacggtcgcttcaaggtggaatacgatcgtaactttcgcccgtatatttacgctctgctgaaagatgacagcgcgatcgatgacgtgcgtaaaattacctctgaacgccacggcaaggtggttcgtgtcatcgatgtggaaaaggttaaaaagaaattcctgggtcgcccgatcgaagtgtggaaactgtatttcgaacatccgcaggatgttccggctatgcgtgacaaaattcgcgaacacccggcggttatcgatatttttgaatatgacatcccgttcgctaaacgttacctgatcgataagggcctgattccgatggagggtaacgaagaactgacctttctggcggtggacattgaaacgctgtaccatgaaggcgaagaattcggcaaaggtccgattatcatgatcagctatgcagatgaagaaggtgctaaagtcatcacctggaagaaaattgacctgccgtatgtggaagtcgtggccaatgaacgtgaaatgattaagcgcctgatcaaagttattcgcgaaaaagatccggacgtcattatcacgtataacggcgataattttgacttcccgtacctgctgaagcgtgccgaaaaactgggcatgaagctgccgctgggtcgcgataacagtgaaccgaaaatgcagcgtctgggcgactccctggcagttgaaatcaaaggtcgcattcattttgacctgtttccggtgatccgtcgcaccattaatctgccgacctatacgctggaagcggtttacgaagccatcttcggcaagcaaaaggaaaaggtctacccgcacgaaatcgcagaagcttgggaaaccggcaaaggtctggaacgtgtcgccaagtatagtatggaagatgcaaaagtgacgtacgaactgggcaaggaatttttcccgatggaagcacagctggctcgcctggtgggccaaccgctgtgggacgtttcccgtagctctaccggtaatctggtggaatggtatctgctgcgtaaagcgtatgaacgcaacgaactggcgccgaataaaccggatgaacgcgaatatgaacgtcgcctgcgtgaaagttatgaaggcggttacgttaaagaaccggaacgcggcctgtgggaaggtattgtgtcactggattttcgtagtctgtacccgtccattatcattacccataacgtttcgccggatacgctgaataaagaaggctgcggtgaatatgacgaagccccggaagtgggtcaccgcttctgtaaagattttccgggcttcattccgtcactgctgggttcgctgctggaagaacgccagaagatcaagaaacgtatgaaggaatctaaggatccggtggaacgcaaactgctggactatcgtcaacgcgcgatcaagattctggccaacagcttttatggctattacggttacgcgaaagcccgttggtactgcaaggaatgtgcagaaagcgtgaccgcttggggccgccagtatattgaactggtccgtcgcgaactggaagaacgtggttttaaagtgctgtatatcgataccgacggcctgtacgccacgattccgggtgaaaagaactgggaagaaatcaagcgtcgcgcactggaatttgttaactacatcaattccaaactgccgggcattctggaactggaatatgaaggcttctacacccgtggctttttcgtgacgaagaaaaagtatgcgctgatcgatgaagaaggcaaaattgtcacccgtggtctggaaatcgtgcgtcgcgattggagtgaaattgccaaagaaacccaggcacgcgtcctggaagcaatcctgaaagatggtgacgtggaagaagccgtccgtattgtgaaagaagttacggaaaaactgtccaaatatgaagttccgccggaaaaactggtcatccatgaacaaattacccgcgaactgaaagattacaaagcgacgggcccgcacgtcgcaatcgctaaacgtctggcggcgcgtggcgtgaaaattcgtccgggtaccgtgatctcatatattgttctgaaaggctcgggtcgtatcggtgaccgcgctattccgtttgatgaattcgacccgaaaaaacacaaatacgatgcggaatactacatcgaaaaccaggttctgccggccgtcgaacgtattctgcgcgcatttggctaccgtaaagaagatctgcgttatcaaaaaaccaaacaagtgggtctgggtgcgtggctgaaaccgaaaggtaaaaaataa

SEQ ID NO: 298 - DNA, 2328 bp, Artificial Sequence
  Synthetic
atgattctggatgctgattacattacggaagatggcaagccgattattcgcctgttcaaaaaggaaaacggtcgcttcaaggtggaatacgatcgtaactttcgcccgtatatttacgctctgctgaaagatgacagcgcgatcgatgacgtgcgtaaaattacctctgaacgccacggcaaggtggttcgtgtcatcgatgtggaaaaggttaaaaagaaattcctgggtcgcccgatcgaagtgtggaaactgtatttcgaacatccgcaggatgttccggctatgcgtgacaaaattcgcgaacacccggcggttatcgatatttttgaatatgacatcccgttcgctaaacgttacctgatcgataagggcctgattccgatggagggtaacgaagaactgacctttctggcggtggacattgaaacgctgtaccatgaaggcgaagaattcggcaaaggtccgattatcatgatcagctatgcagatgaagaaggtgctaaagtcatcacctggaagaaaattgacctgccgtatgtggaagtcgtggccaatgaacgtgaaatgattaagcgcctgatcaaagttattcgcgaaaaagatccggacgtcattatcacgtataacggcgataattttgacttcccgtacctgctgaagcgtgccgaaaaactgggcatgaagctgccgctgggtcgcgataacagtgaaccgaaaatgcagcgtctgggcgactccctggcagttgaaatcaaaggtcgcattcattttgacctgtttccggtgatccgtcgcaccattaatctgccgacctatacgctggaagcggtttacgaagccatcttcggcaagcaaaaggaaaaggtctacccgcacgaaatcgcagaagcttgggaaaccggcaaaggtctggaacgtgtcgccaagtatagtatggaagatgcaaaagtgacgtacgaactgggcaaggaatttttcccgatggaagcacagctggctcgcctggtgggccaaccgctgtgggacgtttcccgtagctctaccggtaatctggtggaatggtatctgctgcgtaaagcgtatgaacgcaacgaactggcgccgaataaaccggatgaacgcgaatatgaacgtcgcctgcgtgaaagttatgaaggcggttacgttaaagaaccggaacgcggcctgtgggaaggtattgtgtcactggattttcgtagtctgtacccgtccattatcattacccataacgtttcgccggatacgctgaataaagaaggctgcggtgaatatgacgaagccccggaagtgggtcaccgcttctgtaaagattttccgggcttcattccgtcactgctgggttcgctgctggaagaacgccagaagatcaagaaacgtatgaaggaatctaaggatccggtggaacgcaaactgctggactatcgtcaacgcgcgatcaagattctggccaacagcttttatggctattacggttacgcgaaagcccgttggtactgcaaggaatgtgcagaaagcgtgaccgcttggggccgccagtatattgaactggtccgtcgcgaactggaagaacgtggttttaaagtgctgtatatcgataccgacggcctgtacgccacgattccgggtgaaaagaactgggaagaaatcaagcgtcgcgcactggaatttgttaactacatcaattccaaactgccgggcattctggaactggaatatgaaggcttctacacccgtggctttttcgtgacgaagaaaaagtatgcgctgatcgatgaagaaggcaaaattgtcacccgtggtctggaaatcgtgcgtcgcgattggagtgaaattgccaaagaaacccaggcacgtgttctggaagcaattctgaaacatggtaacgtcgaagaagcggtcaaaatcgtgaaagaagttacggaaaaactgtctaactacgaaattccgccggaaaaactggccatctacgaacaaattacccgcccgctgcatgaatataaagcaatcggtccgcacgtcgcagtggcaaaacgtctggcagcacgcggcgttaaagtcaaaccgggtatggtcatcggctatattgtgctgcgtggtgatggcccgatcagcaaccgcgcaattctggctgaagaatacgatctgaaaaaacacaaatacgacgccgaatattacatcgaaaatcaggttctgccggctgtcctgcgtattctggaagcgtttggctatcgtaaagaagatctgcgctggcagaaaacccgtcaaacgggtctgacctcatggctgaatattaaaaaatcgtaa

SEQ ID NO: 299 - DNA, 2328 bp, Artificial Sequence
  Synthetic
atgattctggatgctgattacattacggaagatggcaagccgattattcgcctgttcaaaaaggaaaacggtcgcttcaaggtggaatacgatcgtaactttcgcccgtatatttacgctctgctgaaagatgacagcgcgatcgatgacgtgcgtaaaattacctctgaacgccacggcaaggtggttcgtgtcatcgatgtggaaaaggttaaaaagaaattcctgggtcgcccgatcgaagtgtggaaactgtatttcgaacatccgcaggatgttccggctatgcgtgacaaaattcgcgaacacccggcggttatcgatatttttgaatatgacatcccgttcgctaaacgttacctgatcgataagggcctgattccgatggagggtaacgaagaactgacctttctggcggtggacattgaaacgctgtaccatgaaggcgaagaattcggcaaaggtccgattatcatgatcagctatgcagatgaagaaggtgctaaagtcatcacctggaagaaaattgacctgccgtatgtggaagtcgtggccaatgaacgtgaaatgattaagcgcctgatcaaagttattcgcgaaaaagatccggacgtcattatcacgtataacggcgataattttgacttcccgtacctgctgaagcgtgccgaaaaactgggcatgaagctgccgctgggtcgcgataacagtgaaccgaaaatgcagcgtctgggcgactccctggcagttgaaatcaaaggtcgcattcattttgacctgtttccggtgatccgtcgcaccattaatctgccgacctatacgctggaagcggtttacgaagccatcttcggcaagcaaaaggaaaaggtctacccgcacgaaatcgcagaagcttgggaaaccggcaaaggtctggaacgtgtcgccaagtatagtatggaagatgcaaaagtgacgtacgaactgggcaaggaatttttcccgatggaagcacagctggctcgcctggtgggccaaccgctgtgggacgtttcccgtagctctaccggtaatctggtggaatggtatctgctgcgtaaagcgtatgaacgcaacgaactggcgccgaataaaccggatgaacgcgaatatgaacgtcgcctgcgtgaaagttatgaaggcggttacgttaaagaaccggaacgcggcctgtgggaaggtattgtgtcactggattttcgtagtctgtacccgtccattatcattacccataacgtttcgccggatacgctgaataaagaaggctgcggtgaatatgacgaagccccggaagtgggtcaccgcttctgtaaagattttccgggcttcattccgtcactgctgggttcgctgctggaagaacgccagaagatcaagaaacgtatgaaggaatctaaggatccggtggaacgcaaactgctggactatcgtcaacgcgcgatcaagattctggccaacagcttttatggctattacggttacgcgaaagcccgttggtactgcaaggaatgtgcagaaagcgtgaccgcttggggccgccagtatattgaactggtccgtcgcgaactggaagaacgtggttttaaagtgctgtatatcgataccgacggcctgtacgccacgattccgggtgaaaagaactgggaagaaatcaagcgtcgcgcactggaatttgttaactacatcaattccaaactgccgggcattctggaactggaatatgaaggcttctacacccgtggctttttcgtgacgaagaaaaagtatgcgctgatcgatgaagaaggcaaaattgtcacccgtggtctggaaatcgtgcgtcgcgattggagtgaaattgccaaagaaacccaggcaaaagttctggaagcaatcctgaaacatggtaatgtcgaagaagcagtgaaaattgtcaaggaagtgacggaaaaactgtcgaagtatgaaatcccgccggaaaaactggtgatctacgaacaaattacccgcccgctgcatgaatataaagcgattggcccgcacgtggcagttgctaaacgtctggcagcccgcggtgtcaaagtgcgtccgggcatggtgatcggttatattgttctgcgtggcgatggtccgatcagtaaacgcgcgattctggccgaagaatttgatccgcgcaaacacaagtacgacgccgaatattacatcgaaaaccaggtgctgccggctgttctgcgtattctggaagcgttcggctatcgtaaagaagatctgcgctggcagaaaaccaagcaaacgggtctgaccgcatggctgaatgtgaaaaagaaataa

SEQ ID NO: 300 - DNA, 2328 bp, Artificial Sequence
  Synthetic
atgattctggatgctgattacattacggaagatggcaagccgattattcgcctgttcaaaaaggaaaacggtcgcttcaaggtggaatacgatcgtaactttcgcccgtatatttacgctctgctgaaagatgacagcgcgatcgatgacgtgcgtaaaattacctctgaacgccacggcaaggtggttcgtgtcatcgatgtggaaaaggttaaaaagaaattcctgggtcgcccgatcgaagtgtggaaactgtatttcgaacatccgcaggatgttccggctatgcgtgacaaaattcgcgaacacccggcggttatcgatatttttgaatatgacatcccgttcgctaaacgttacctgatcgataagggcctgattccgatggagggtaacgaagaactgacctttctggcggtggacattgaaacgctgtaccatgaaggcgaagaattcggcaaaggtccgattatcatgatcagctatgcagatgaagaaggtgctaaagtcatcacctggaagaaaattgacctgccgtatgtggaagtcgtggccaatgaacgtgaaatgattaagcgcctgatcaaagttattcgcgaaaaagatccggacgtcattatcacgtataacggcgataattttgacttcccgtacctgctgaagcgtgccgaaaaactgggcatgaagctgccgctgggtcgcgataacagtgaaccgaaaatgcagcgtctgggcgactccctggcagttgaaatcaaaggtcgcattcattttgacctgtttccggtgatccgtcgcaccattaatctgccgacctatacgctggaagcggtttacgaagccatcttcggcaagcaaaaggaaaaggtctacccgcacgaaatcgcagaagcttgggaaaccggcaaaggtctggaacgtgtcgccaagtatagtatggaagatgcaaaagtgacgtacgaactgggcaaggaatttttcccgatggaagcacagctggctcgcctggtgggccaaccgctgtgggacgtttcccgtagctctaccggtaatctggtggaatggtatctgctgcgtaaagcgtatgaacgcaacgaactggcgccgaataaaccgtcgggccgcgaatacgatgaacgtcgcgaaggttatgcgggcggttacgttaaagaaccggaacgtggtctgtgggaaaacatcgtgtacctggattacaaaagtctgtatccgtccattatcattacccataacgtgagcccggacacgctgaatcgcgaaggctgcaaagaatacgatgtcgccccgcaagtgggtcacaaattttgtaaagactttccgggcttcattccgtctctgctgggtgatctgctggaagaacgtcagaaaattaaaaagaaaatgaaagcaaccaaagatccgattgagaaaaaactgctggactatcgtcaacgcgcgatcaaaattctggccaacagttattacggctattacggttatgcgaaagcccgctggtactgcaaagaatgtgcagaatccgttacggcttggggccgtgaatatatcgaaaccacgatccgcgaaatcgaagaaaaatacggtttcaaagtgctgtacgccgataccgacggcttccatgcaacgatcccgggtgaagatgctgaagaaattaagaaaaaagcgaaagaattcctgaaatacatcaacagcaaactgccgggcgccctggaactggaatatgaaggcttctaccgtcgcggctttttcgtgaccaagaaaaaatacgcagttatcgacgaagaaggcaaaattaccacgcgtggtctggaaatcgtgcgtcgcgattggagtgaaattgccaaagaaacccaggcacgcgttctggaagcaatcctgcgtcatggtgacgtcgaagaagccgttcgcattgtcaaagatgtgacggaaaagctgtcgaaatatgaagtcccgccggaaaaactggtgatccatgaacaaattacccgtgaactgaaggattacaaagcgacgggcccgcacgttgcaattgctaaacgcctggcagcccgtggcatcaagattcgtccgggtaccgttatcagctatattgtcctgaaaggctctggtcgcatcggtgatcgtgctattccgtttgatgaattcgacccgacgaaacaccgttacgatgccgaatattacatcgaaaatcaggtgctgccggccgttgaacgcattctgaaagcatttggctataagaaagaagaactgcgctaccagaaaacccgtcaagtgggcctgggtgcgtggctgaagctgaaaggtaagaaataa

SEQ ID NO: 301 - DNA, 2538 bp, Artificial Sequence
  Synthetic
atgatcttagatgcagattatatcacggaagaaggcaaaccagtgattcgcctgtttaaaaaagaaaatggcgaatttaaaatcgaacatgatcgcacctttcgcccgtatatctatgccctgctgaaagatgatagtaaaatcgaagaagttaagaaaatcacagcggaacgtcatggtaaaattgttcgcatcgttgatgcggaaaaagttgaaaagaaatttctgggtcgtcctattacagtttggcgtctgtattttgaacatcctcaggatgttccgacgattcgcgaaaaaatccgcgaacatagcgccgttgtggacatatttgaatatgatattccgtttgccaaacgctatctgattgataaaggtttaatccctatggaaggcgatgaagaactgaaactgttagcgtttgacatcgaaaccctgtatcatgaaggtgaagaatttggcaaaggcccgatcatcatgatctcttatgcagatgaagaagaagctaaagtgatcacttggaagaagatcgatttaccgtatgttgaagttgtgtctagtgaacgcgaaatgatcaaacgctttctgaaaatcattcgcgaaaaagatccggatattatcattacctataatggtgatagctttgatttaccttatttagccaaacgtgccgaaaaactgggcatcaaactgacgatcggtcgtgatggtagcgaacctaaaatgcagcgcatcggcgatatgacagcagttgaagttaaaggtcgcatccattttgatctgtatcatgttattcgtcgtacaatcaatttaccgacctataccctggaagcagtgtatgaagccatctttggtaaacctaaagaaaaagtgtatgcggatgaaattgctaaagcttgggaaacgggcgaaggcttagaacgcgttgctaaatatagcatggaagatgccaaagctacctatgaactgggcaaagaatttttccctatggaagctcagctgagtcgtctggtgggtcagcctctgtgggatgtgagtcgtagtagtacgggcaatttagtggaatggtttctgctgcgcaaagcctatgaacgtaatgaattagcacctaacaaaccggatgaacgcgaatatgaacgccgcctgcgtgaatcttatgcaggcggttttgttaaagaaccggaaaaaggcctgtgggaaaatattgtgtctctggattttcgtgcactgtatccgagcatcatcattacacataatgtgtctccagataccctgaatcgcgaaggttgtcgtaattatgatgttgctccggaagtgggtcataaattttgcaaagattttccaggttttattccgagtctgctgaaacgcttactggatgaacgtcagaaaatcaaaaccaaaatgaaagcctcacaggatcctatcgaaaaaatcatgttagattatcgtcagcgtgccatcaaaattctggccaatagctattatggctattatggctatgctaaagctcgctggtattgcaaagaatgcgccgaatcagtgaccgcttggggtcgcgaatatatcgaatttgtgtggaaagaactggaagaaaaatttggctttaaagttctgtatatcgataccgatggcctgtatgttaccattccgggtggtaaatctgaagaaattaagaagaaggccttagaatttgtggattatattaatgccaaactgccgggcctgctggaactggaatatgaaggcttttataaacgcggcttcttcgtgaccaagaaaaaatatgcactgatcgatgaagaaggtaaaatcattacacgcggcttagaaattgtgcgccgcgattggagcgaaattgccaaagaaacccaggcccgcgttctggaagccatcctgaaacatggtaatgtggaagaagcagttcgcattgttaaagaagtgacacagaaactgagcaaatatgaaatcccaccggaaaaactggccatctatgaacagattacacgtccactgcatgaatataaagccattggtccacatgttgcggttgccaaacgcttagccgctaaaggtgttaaaatcaaaccaggcatggttatcggctatattgttctgcgcggcgatggtccgatctctaatcgtgccatcttagcggaagaatatgatccacgcaaacataaatatgatgccgaatattatatcgaaaatcaggtgttaccagcagtgctgcgcattctggaaggctttggctatcgcaaagaagatttacgttggcagaaaaccaaacagacgggcctgacaagttggctgaatattaaaaaatcaggtacgggcggtggcggtgctacggttaaatttaaatataaaggcgaagaaaaagaagtggatattagtaaaatcaaaaaagtttggcgtgtgggcaaaatgatctctttcacttatgatgaaggcggcggcaaaaccggccgcggtgccgtgagcgaaaaagatgctcctaaagaactgttgcaaatgttagaaaaacagaaaaaaaattaa

SEQ ID NO: 302 - DNA, 2538 bp, Artificial Sequence
  Synthetic
atgatcttagatgcagattatatcacggaagaaggcaaaccagtgattcgcctgtttaaaaaagaaaatggcgaatttaaaatcgaacatgatcgcacctttcgcccgtatatctatgccctgctgaaagatgatagtaaaatcgaagaagttaagaaaatcacagcggaacgtcatggtaaaattgttcgcatcgttgatgcggaaaaagttgaaaagaaatttctgggtcgtcctattacagtttggcgtctgtattttgaacatcctcaggatgttccgacgattcgcgaaaaaatccgcgaacatagcgccgttgtggacatatttgaatatgatattccgtttgccaaacgctatctgattgataaaggtttaatccctatggaaggcgatgaagaactgaaactgttagcgtttgacatcgaaaccctgtatcatgaaggtgaagaatttggcaaaggcccgatcatcatgatctcttatgcagatgaagaagaagctaaagtgatcacttggaagaagatcgatttaccgtatgttgaagttgtgtctagtgaacgcgaaatgatcaaacgctttctgaaaatcattcgcgaaaaagatccggatattatcattacctataatggtgatagctttgatttaccttatttagccaaacgtgccgaaaaactgggcatcaaactgacgatcggtcgtgatggtagcgaacctaaaatgcagcgcatcggcgatatgacagcagttgaagttaaaggtcgcatccattttgatctgtatcatgttattcgtcgtacaatcaatttaccgacctataccctggaagcagtgtatgaagccatctttggtaaacctaaagaaaaagtgtatgcggatgaaattgctaaagcttgggaaacgggcgaaggcttagaacgcgttgctaaatatagcatggaagatgccaaagctacctatgaactgggcaaagaatttttccctatggaagctcagctgagtcgtctggtgggtcagcctctgtgggatgtgagtcgtagtagtacgggcaatttagtggaatggtttctgctgcgcaaagcctatgaacgtaatgaattagcacctaacaaaccggataaacgcgaatatgaacgccgcctgcgtgaatcttatgcaggcggttttgttaaagaaccggaaaaaggcctgtgggaaaatattgtgtctctggattttcgtgcactgtatccgagcatcatcattacacataatgtgtctccagataccctgaatcgcgaaggttgtcgtaattatgatgttgctccggaagtgggtcataaattttgcaaagattttccaggttttattccgagtctgctgaaacgcttactggatgaacgtcagaaaatcaaaaccaaaatgaaagcctcacaggatcctatcgaaaaaatcatgttagattatcgtcagcgtgccatcaaaattctggccaatagctattatggctattatggctatgctaaagctcgctggtattgcaaagaatgcgccgaatcagtgaccgcttggggtcgcgaatatatcgaatttgtgtggaaagaactggaagaaaaatttggctttaaagttctgtatatcgataccgatggcctgtatgcgaccattccgggtggtaaatctgaagaaattaagaagaaggccttagaatttgtggattatattaatgccaaactgccgggcctgctggaactggaatatgaaggcttttataaacgcggcttcttcgtgaccaagaaaaaatatgcactgatcgatgaagaaggtaaaatcattacacgcggcttagaaattgtgcgccgcgattggagcgaaattgccaaagaaacccaggcccgcgttctggaagccatcctgaaacatggtaatgtggaagaagcagttcgcattgttaaagaagtgacacagaaactgagcaaatatgaaatcccaccggaaaaactggccatctatgaacagattacacgtccactgcatgaatataaagccattggtccacatgttgcggttgccaaacgcttagccgctaaaggtgttaaaatcaaaccaggcatggttatcggctatattgttctgcgcggcgatggtccgatctctaatcgtgccatcttagcggaagaatatgatccacgcaaacataaatatgatgccgaatattatatcgaaaatcaggtgttaccagcagtgctgcgcattctggaaggctttggctatcgcaaagaagatttacgttggcagaaaaccaaacagacgggcctgacaagttggctgaatattaaaaaatcaggtacgggcggtggcggtgctacggttaaatttaaatataaaggcgaagaaaaagaagtggatattagtaaaatcaaaaaagtttggcgtgtgggcaaaatgatctctttcacttatgatgaaggcggcggcaaaaccggccgcggtgccgtgagcgaaaaagatgctcctaaagaactgttgcaaatgttagaaaaacagaaaaaaaattaa

SEQ ID NO: 303 - DNA, 2538 bp, Artificial Sequence
  Synthetic
atgatcttagatgcagattatatcacggaagaaggcaaaccagtgattcgcctgtttaaaaaagaaaatggcgaatttaaaatcgaacatgatcgcacctttcgcccgtatatctatgccctgctgaaagatgatagtaaaatcgaagaagttaagaaaatcacagcggaacgtcatggtaaaattgttcgcatcgttgatgcggaaaaagttgaaaagaaatttctgggtcgtcctattacagtttggcgtctgtattttgaacatcctcaggatgttccgacgattcgcgaaaaaatccgcgaacatagcgccgttgtggacatatttgaatatgatattccgtttgccaaacgctatctgattgataaaggtttaatccctatggaaggcgatgaagaactgaaactgttagcgtttgacatcgaaaccctgtatcatgaaggtgaagaatttggcaaaggcccgatcatcatgatctcttatgcagatgaagaagaagctaaagtgatcacttggaagaagatcgatttaccgtatgttgaagttgtgtctagtgaacgcgaaatgatcaaacgctttctgaaaatcattcgcgaaaaagatccggatattatcattacctataatggtgatagctttgatttaccttatttagccaaacgtgccgaaaaactgggcatcaaactgacgatcggtcgtgatggtagcgaacctaaaatgcagcgcatcggcgatatgacagcagttgaagttaaaggtcgcatccattttgatctgtatcatgttattcgtcgtacaatcaatttaccgacctataccctggaagcagtgtatgaagccatctttggtaaacctaaagaaaaagtgtatgcggatgaaattgctaaagcttgggaaacgggcgaaggcttagaacgcgttgctaaatatagcatggaagatgccaaagctacctatgaactgggcaaagaatttttccctatggaagctcagctgagtcgtctggtgggtcagcctctgtgggatgtgagtcgtagtagtacgggcaatttagtggaatggtttctgctgcgcaaagcctatgaacgtaatgaattagcacctaacaaaccggatgaacgcgaatatgaacgccgcctgcgtgaatcttatgcaggcggttttgttaaagaaccggaaaaaggcctgtgggaaaatattgtgtctctggattttcgtgcactgtatccgagcatcatcattacacataatgtgtctccagataccctgaatcgcgaaggttgtcgtaattatgatgttgctccggaagtgggtcataaattttgcaaagattttccaggttttattccgagtctgctgaaacgcttactggatgaacgtcagaaaatcaaaaccaaaatgaaagcctcacaggatcctatcgaaaaaatcatgttagattatcgtcagcgtgccatcaaaattctggccaatagctattatggctattatggctatgctaaagctcgctggtattgcaaagaatgcgccgaatcagtgaccgcttggggtcgcgaatatatcgaatttgtgtggaaagaactggaagaaaaatttggctttaaagttctgtatatcgataccgatggcctgtatgcgaccattccgggtggtaaatctgaagaaattaagaagaaggccttagaatttgtggattatattaatgccaaactgccgggcctgctggaactggaatatgaaggcttttataaacgcggcctgttcgtgaccaagaaaaaatatgcactgatcgatgaagaaggtaaaatcattacacgcggcttagaaattgtgcgccgcgattggagcgaaattgccaaagaaacccaggcccgcgttctggaagccatcctgaaacatggtaatgtggaagaagcagttcgcattgttaaagaagtgacacagaaactgagcaaatatgaaatcccaccggaaaaactggccatctatgaacagattacacgtccactgcatgaatataaagccattggtccacatgttgcggttgccaaacgcttagccgctaaaggtgttaaaatcaaaccaggcatggttatcggctatattgttctgcgcggcgatggtccgatctctaatcgtgccatcttagcggaagaatatgatccacgcaaacataaatatgatgccgaatattatatcgaaaatcaggtgttaccagcagtgctgcgcattctggaaggctttggctatcgcaaagaagatttacgttggcagaaaaccaaacagacgggcctgacaagttggctgaatattaaaaaatcaggtacgggcggtggcggtgctacggttaaatttaaatataaaggcgaagaaaaagaagtggatattagtaaaatcaaaaaagtttggcgtgtgggcaaaatgatctctttcacttatgatgaaggcggcggcaaaaccggccgcggtgccgtgagcgaaaaagatgctcctaaagaactgttgcaaatgttagaaaaacagaaaaaaaattaa

SEQ ID NO: 304 - DNA, 2538 bp, Artificial Sequence
  Synthetic
atgatcttagatgcagattatatcacggaagaaggcaaaccagtgattcgcctgtttaaaaaagaaaatggcgaatttaaaatcgaacatgatcgcacctttcgcccgtatatctatgccctgctgaaagatgatagtaaaatcgaagaagttaagaaaatcacagcggaacgtcatggtaaaattgttcgcatcgttgatgcggaaaaagttgaaaagaaatttctgggtcgtcctattacagtttggcgtctgtattttgaacatcctcaggatgttccgacgattcgcgaaaaaatccgcgaacatagcgccgttgtggacatatttgaatatgatattccgtttgccaaacgctatctgattgataaaggtttaatccctatggaaggcgatgaagaactgaaactgttagcgtttgacatcgaaaccctgtatcatgaaggtgaagaatttggcaaaggcccgatcatcatgatctcttatgcagatgaagaagaagctaaagtgatcacttggaagaagatcgatttaccgtatgttgaagttgtgtctagtgaacgcgaaatgatcaaacgctttctgaaaatcattcgcgaaaaagatccggatattatcattacctataatggtgatagctttgatttaccttatttagccaaacgtgccgaaaaactgggcatcaaactgacgatcggtcgtgatggtagcgaacctaaaatgcagcgcatcggcgatatgacagcagttgaagttaaaggtcgcatccattttgatctgtatcatgttattcgtcgtacaatcaatttaccgacctataccctggaagcagtgtatgaagccatctttggtaaacctaaagaaaaagtgtatgcggatgaaattgctaaagcttgggaaacgggcgaaggcttagaacgcgttgctaaatatagcatggaagatgccaaagctacctatgaactgggcaaagaatttttccctatggaagctcagctgagtcgtctggtgggtcagcctctgtgggatgtgagtcgtagtagtacgggcaatttagtggaatggtttctgctgcgcaaagcctatgaacgtaatgaattagcacctaacaaaccggatgaacgcgaatatgaacgccgcctgcgtgaatcttatgcaggcggttttgttaaagaaccggaaaaaggcctgtgggaaaatattgtgtctctggattttcgtgcactgtatccgagcatcatcattacacataatgtgtctccagataccctgaatcgcgaaggttgtcgtaattatgatgttgctccggaagtgggtcataaattttgcaaagattttccaggttttattccgagtctgctgaaacgcttactggatgaacgtcagaaaatcaaaaccaaaatgaaagcctcacaggatcctatcgaaaaaatcatgttagattatcgtcagcgtgccatcaaaattctggccaatagctattatggctattatggctatgctcgcgctcgctggtattgcaaagaatgcgccgaatcagtgaccgcttggggtcgcgaatatatcgaatttgtgtggaaagaactggaagaaaaatttggctttaaagttctgtatatcgataccgatggcctgtatgcgaccattccgggtggtaaatctgaagaaattaagaagaaggccttagaatttgtggattatattaatgccaaactgccgggcctgctggaactggaatatgaaggcttttataaacgcggcttcttcgtgaccaagaaaaaatatgcactgatcgatgaagaaggtaaaatcattacacgcggcttagaaattgtgcgccgcgattggagcgaaattgccaaagaaacccaggcccgcgttctggaagccatcctgaaacatggtaatgtggaagaagcagttcgcattgttaaagaagtgacacagaaactgagcaaatatgaaatcccaccggaaaaactggccatctatgaacagattacacgtccactgcatgaatataaagccattggtccacatgttgcggttgccaaacgcttagccgctaaaggtgttaaaatcaaaccaggcatggttatcggctatattgttctgcgcggcgatggtccgatctctaatcgtgccatcttagcggaagaatatgatccacgcaaacataaatatgatgccgaatattatatcgaaaatcaggtgttaccagcagtgctgcgcattctggaaggctttggctatcgcaaagaagatttacgttggcagaaaaccaaacagacgggcctgacaagttggctgaatattaaaaaatcaggtacgggcggtggcggtgctacggttaaatttaaatataaaggcgaagaaaaagaagtggatattagtaaaatcaaaaaagtttggcgtgtgggcaaaatgatctctttcacttatgatgaaggcggcggcaaaaccggccgcggtgccgtgagcgaaaaagatgctcctaaagaactgttgcaaatgttagaaaaacagaaaaaaaattaa

SEQ ID NO: 305 - DNA, 2538 bp, Artificial Sequence
  Synthetic
atgatcttagatgcagattatatcacggaagaaggcaaaccagtgattcgcctgtttaaaaaagaaaatggcgaatttaaaatcgaacatgatcgcacctttcgcccgtatatctatgccctgctgaaagatgatagtaaaatcgaagaagttaagaaaatcacagcggaacgtcatggtaaaattgttcgcatcgttgatgcggaaaaagttgaaaagaaatttctgggtcgtcctattacagtttggcgtctgtattttgaacatcctcaggatgttccgacgattcgcgaaaaaatccgcgaacatagcgccgttgtggacatatttgaatatgatattccgtttgccaaacgctatctgattgataaaggtttaatccctatggaaggcgatgaagaactgaaactgttagcgtttgacatcgaaaccctgtatcatgaaggtgaagaatttggcaaaggcccgatcatcatgatctcttatgcagatgaagaagaagctaaagtgatcacttggaagaagatcgatttaccgtatgttgaagttgtgtctagtgaacgcgaaatgatcaaacgctttctgaaaatcattcgcgaaaaagatccggatattatcattacctatgatggtgatagctttgatttaccttatttagccaaacgtgccgaaaaactgggcatcaaactgacgatcggtcgtgatggtagcgaacctaaaatgcagcgcatcggcgatatgacagcagttgaagttaaaggtcgcatccattttgatctgtatcatgttattcgtcgtacaatcaatttaccgacctataccctggaagcagtgtatgaagccatctttggtaaacctaaagaaaaagtgtatgcggatgaaattgctaaagcttgggaaacgggcgaaggcttagaacgcgttgctaaatatagcatggaagatgccaaagctacctatgaactgggcaaagaatttttccctatggaagctcagctgagtcgtctggtgggtcagcctctgtgggatgtgagtcgtagtagtacgggcaatttagtggaatggtttctgctgcgcaaagcctatgaacgtaatgaattagcacctaacaaaccggatgaacgcgaatatgaacgccgcctgcgtgaatcttatgcaggcggttttgttaaagaaccggaaaaaggcctgtgggaaaatattgtgtctctggattttcgtgcactgtatccgagcatcatcattacacataatgtgtctccagataccctgaatcgcgaaggttgtcgtaattatgatgttgctccggaagtgggtcataaattttgcaaagattttccaggttttattccgagtctgctgaaacgcttactggatgaacgtcagaaaatcaaaaccaaaatgaaagcctcacaggatcctatcgaaaaaatcatgttagattatcgtcagcgtgccatcaaaattctggccaatagctattatggctattatggctatgctaaagctcgctggtattgcaaagaatgcgccgaatcagtgaccgcttggggtcgcgaatatatcgaatttgtgtggaaagaactggaagaaaaatttggctttaaagttctgtatatcgataccgatggcctgtatgcgaccattccgggtggtaaatctgaagaaattaagaagaaggccttagaatttgtggattatattaatgccaaactgccgggcctgctggaactggaatatgaaggcttttataaacgcggcttcttcgtgaccaagaaaaaatatgcactgatcgatgaagaaggtaaaatcattacacgcggcttagaaattgtgcgccgcgattggagcgaaattgccaaagaaacccaggcccgcgttctggaagccatcctgaaacatggtaatgtggaagaagcagttcgcattgttaaagaagtgacacagaaactgagcaaatatgaaatcccaccggaaaaactggccatctatgaacagattacacgtccactgcatgaatataaagccattggtccacatgttgcggttgccaaacgcttagccgctaaaggtgttaaaatcaaaccaggcatggttatcggctatattgttctgcgcggcgatggtccgatctctaatcgtgccatcttagcggaagaatatgatccacgcaaacataaatatgatgccgaatattatatcgaaaatcaggtgttaccagcagtgctgcgcattctggaaggctttggctatcgcaaagaagatttacgttggcagaaaaccaaacagacgggcctgacaagttggctgaatattaaaaaatcaggtacgggcggtggcggtgctacggttaaatttaaatataaaggcgaagaaaaagaagtggatattagtaaaatcaaaaaagtttggcgtgtgggcaaaatgatctctttcacttatgatgaaggcggcggcaaaaccggccgcggtgccgtgagcgaaaaagatgctcctaaagaactgttgcaaatgttagaaaaacagaaaaaaaattaa

SEQ ID NO: 306 - DNA, 2538 bp, Artificial Sequence
  Synthetic
atgatcttagatgcagattatatcacggaagaaggcaaaccagtgattcgcctgtttaaaaaagaaaatggcgaatttaaaatcgaacatgatcgcacctttcgcccgtatatctatgccctgctgaaagatgatagtaaaatcgaagaagttaagaaaatcacagcggaacgtcatggtaaaattgttcgcatcgttgatgcggaaaaagttgaaaagaaatttctgggtcgtcctattacagtttggcgtctgtattttgaacatcctcaggatgttccgacgattcgcgaaaaaatccgcgaacatagcgccgttgtggacatatttgaatatgatattccgtttgccaaacgctatctgattgataaaggtttaatccctatggaaggcgatgaagaactgaaactgttagcgtttgacatcgaaaccctgtatcatgaaggtgaagaatttggcaaaggcccgatcatcatgatctcttatgcagatgaagaagaagctaaagtgatcacttggaagaagatcgatttaccgtatgttgaagttgtgtctagtgaacgcgaaatgatcaaacgctttctgaaaatcattcgcgaaaaagatccggatattatcattacctataatggtgatagctttgatttaccttatttagccaaacgtgccgaaaaactgggcatcaaactgacgatcggtcgtgatggtagcgaacctaaaatgcagcgcatcggcgatatgacagcagttgaagttaaaggtcgcatccattttgatctgtatcatgttattcgtcgtacaatcaatttaccgacctataccctggaagcagtgtatgaagccatctttggtaaacctaaagaaaaagtgtatgcggatgaaattgctaaagcttgggaaacgggcgaaggcttagaacgcgttgctaaatatagcatggaagatgccaaagctacctatgaactgggcaaagaatttttccctatggaagctcagctgagtcgtctggtgggtcagcctctgtgggatgtgagtcgtagtagtacgggcaatttagtggaatggtttctgctgcgcaaagcctatgaacgtaatgaattagcacctaacaaaccggatgaacgcgaatatgaacgccgcctgcgtgaatcttatgcaggcggttttgttaaagaaccggaaaaaggcctgtgggaaaatattgtgtctctggattttcatgcactgtatccgagcatcatcattacacataatgtgtctccagataccctgaatcgcgaaggttgtcgtaattatgatgttgctccggaagtgggtcataaattttgcaaagattttccaggttttattccgagtctgctgaaacgcttactggatgaacgtcagaaaatcaaaaccaaaatgaaagcctcacaggatcctatcgaaaaaatcatgttagattatcgtcagcgtgccatcaaaattctggccaatagctattatggctattatggctatgctaaagctcgctggtattgcaaagaatgcgccgaatcagtgaccgcttggggtcgcgaatatatcgaatttgtgtggaaagaactggaagaaaaatttggctttaaagttctgtatatcgataccgatggcctgtatgcgaccattccgggtggtaaatctgaagaaattaagaagaaggccttagaatttgtggattatattaatgccaaactgccgggcctgctggaactggaatatgaaggcttttataaacgcggcttcttcgtgaccaagaaaaaatatgcactgatcgatgaagaaggtaaaatcattacacgcggcttagaaattgtgcgccgcgattggagcgaaattgccaaagaaacccaggcccgcgttctggaagccatcctgaaacatggtaatgtggaagaagcagttcgcattgttaaagaagtgacacagaaactgagcaaatatgaaatcccaccggaaaaactggccatctatgaacagattacacgtccactgcatgaatataaagccattggtccacatgttgcggttgccaaacgcttagccgctaaaggtgttaaaatcaaaccaggcatggttatcggctatattgttctgcgcggcgatggtccgatctctaatcgtgccatcttagcggaagaatatgatccacgcaaacataaatatgatgccgaatattatatcgaaaatcaggtgttaccagcagtgctgcgcattctggaaggctttggctatcgcaaagaagatttacgttggcagaaaaccaaacagacgggcctgacaagttggctgaatattaaaaaatcaggtacgggcggtggcggtgctacggttaaatttaaatataaaggcgaagaaaaagaagtggatattagtaaaatcaaaaaagtttggcgtgtgggcaaaatgatctctttcacttatgatgaaggcggcggcaaaaccggccgcggtgccgtgagcgaaaaagatgctcctaaagaactgttgcaaatgttagaaaaacagaaaaaaaattaa

SEQ ID NO: 307 - DNA, 2538 bp, Artificial Sequence
  Synthetic
atgatcttagatgcagattatatcacggaagaaggcaaaccagtgattcgcctgtttaaaaaagaaaatggcgaatttaaaatcgaacatgatcgcacctttcgcccgtatatctatgccctgctgaaagatgatagtaaaatcgaagaagttaagaaaatcacagcggaacgtcatggtaaaattgttcgcatcgttgatgcggaaaaagttgaaaagaaatttctgggtcgtcctattacagtttggcgtctgtattttgaacatcctcaggatgttccgacgattcgcgaaaaaatccgcgaacatagcgccgttgtggacatatttgaatatgatattccgtttgccaaacgctatctgattgataaaggtttaatccctatggaaggcgatgaagaactgaaactgttagcgtttgacatcgaaaccctgtatcatgaaggtgaagaatttggcaaaggcccgatcatcatgatctcttatgcagatgaagaagaagctaaagtgatcacttggaagaagatcgatttaccgtatgttgaagttgtgtctagtgaacgcgaaatgatcaaacgctttctgaaaatcattcgcgaaaaagatccggatattatcattacctataatggtgatgattttgatttaccttatttagccaaacgtgccgaaaaactgggcatcaaactgacgatcggtcgtgatggtagcgaacctaaaatgcagcgcatcggcgatatgacagcagttgaagttaaaggtcgcatccattttgatctgtatcatgttattcgtcgtacaatcaatttaccgacctataccctggaagcagtgtatgaagccatctttggtaaacctaaagaaaaagtgtatgcggatgaaattgctaaagcttgggaaacgggcgaaggcttagaacgcgttgctaaatatagcatggaagatgccaaagctacctatgaactgggcaaagaatttttccctatggaagctcagctgagtcgtctggtgggtcagcctctgtgggatgtgagtcgtagtagtacgggcaatttagtggaatggtttctgctgcgcaaagcctatgaacgtaatgaattagcacctaacaaaccggatgaacgcgaatatgaacgccgcctgcgtgaatcttatgcaggcggttttgttaaagaaccggaaaaaggcctgtgggaaaatattgtgtctctggattttcgtgcactgtatccgagcatcatcattacacataatgtgtctccagataccctgaatcgcgaaggttgtcgtaattatgatgttgctccggaagtgggtcataaattttgcaaagattttccaggttttattccgagtctgctgaaacgcttactggatgaacgtcagaaaatcaaaaccaaaatgaaagcctcacaggatcctatcgaaaaaatcatgttagattatcgtcagcgtgccatcaaaattctggccaatagctattatggctattatggctatgctaaagctcgctggtattgcaaagaatgcgccgaatcagtgaccgcttggggtcgcgaatatatcgaatttgtgtggaaagaactggaagaaaaatttggctttaaagttctgtatatcgataccgatggcctgtatgcgaccattccgggtggtaaatctgaagaaattaagaagaaggccttagaatttgtggattatattaatgccaaactgccgggcctgctggaactggaatatgaaggcttttataaacgcggcttcttcgtgaccaagaaaaaatatgcactgatcgatgaagaaggtaaaatcattacacgcggcttagaaattgtgcgccgcgattggagcgaaattgccaaagaaacccaggcccgcgttctggaagccatcctgaaacatggtaatgtggaagaagcagttcgcattgttaaagaagtgacacagaaactgagcaaatatgaaatcccaccggaaaaactggccatctatgaacagattacacgtccactgcatgaatataaagccattggtccacatgttgcggttgccaaacgcttagccgctaaaggtgttaaaatcaaaccaggcatggttatcggctatattgttctgcgcggcgatggtccgatctctaatcgtgccatcttagcggaagaatatgatccacgcaaacataaatatgatgccgaatattatatcgaaaatcaggtgttaccagcagtgctgcgcattctggaaggctttggctatcgcaaagaagatttacgttggcagaaaaccaaacagacgggcctgacaagttggctgaatattaaaaaatcaggtacgggcggtggcggtgctacggttaaatttaaatataaaggcgaagaaaaagaagtggatattagtaaaatcaaaaaagtttggcgtgtgggcaaaatgatctctttcacttatgatgaaggcggcggcaaaaccggccgcggtgccgtgagcgaaaaagatgctcctaaagaactgttgcaaatgttagaaaaacagaaaaaaaattaa

SEQ ID NO: 308 - DNA, 2538 bp, Artificial Sequence
  Synthetic
atgatcttagatgcagattatatcacggaagaaggcaaaccagtgattcgcctgtttaaaaaagaaaatggcgaatttaaaatcgaacatgatcgcacctttcgcccgtatatctatgccctgctgaaagatgatagtaaaatcgaagaagttaagaaaatcacagcggaacgtcatggtaaaattgttcgcatcgttgatgcggaaaaagttgaaaagaaatttctgggtcgtcctattacagtttggcgtctgtattttgaacatcctcaggatgttccgacgattcgcgaaaaaatccgcgaacatagcgccgttgtggacatatttgaatatgatattccgtttgccaaacgctatctgattgataaaggtttaatccctatggaaggcgatgaagaactgaaactgttagcgtttgacatcgaaaccctgtatcatgaaggtgaagaatttggcaaaggcccgatcatcatgatctcttatgcagatgaagaagaagctaaagtgatcacttggaagaagatcgatttaccgtatgttgaagttgtgtctagtgaacgcgaaatgatcaaacgctttctgaaaatcattcgcgaaaaagatccggatattatcattacctataatggtgataattttgatttaccttatttagccaaacgtgccgaaaaactgggcatcaaactgacgatcggtcgtgatggtagcgaacctaaaatgcagcgcatcggcgatatgacagcagttgaagttaaaggtcgcatccattttgatctgtatcatgttattcgtcgtacaatcaatttaccgacctataccctggaagcagtgtatgaagccatctttggtaaacctaaagaaaaagtgtatgcggatgaaattgctaaagcttgggaaacgggcgaaggcttagaacgcgttgctaaatatagcatggaagatgccaaagctacctatgaactgggcaaagaatttttccctatggaagctcagctgagtcgtctggtgggtcagcctctgtgggatgtgagtcgtagtagtacgggcaatttagtggaatggtttctgctgcgcaaagcctatgaacgtaatgaattagcacctaacaaaccggatgaacgcgaatatgaacgccgcctgcgtgaatcttatgcaggcggttttgttaaagaaccggaaaaaggcctgtgggaaaatattgtgtctctggattttcgtgcactgtatccgagcatcatcattacacataatgtgtctccagataccctgaatcgcgaaggttgtcgtaattatgatgttgctccggaagtgggtcataaattttgcaaagattttccaggttttattccgagtctgctgaaacgcttactggatgaacgtcagaaaatcaaaaccaaaatgaaagcctcacaggatcctatcgaaaaaatcatgttagattatcgtcagcgtgccatcaaaattctggccaatagctattatggctattatggctatgctaaagctcgctggtattgcaaagaatgcgccgaatcagtgaccgcttggggtcgcgaatatatcgaatttgtgtggaaagaactggaagaaaaatttggctttaaagttctgtatatcgataccgatggcctgtatgcgaccattccgggtggtaaatctgaagaaattaagaagaaggccttagaatttgtggattatattaatgccaaactgccgggcctgctggaactggaatatgaaggcttttataaacgcggcttcttcgtgaccaagaaaaaatatgcactgatcgatgaagaaggtaaaatcattacacgcggcttagaaattgtgcgccgcgattggagcgaaattgccaaagaaacccaggcccgcgttctggaagccatcctgaaacatggtaatgtggaagaagcagttcgcattgttaaagaagtgacacagaaactgagcaaatatgaaatcccaccggaaaaactggccatctatgaacagattacacgtccactgcatgaatataaagccattggtccacatgttgcggttgccaaacgcttagccgctaaaggtgttaaaatcaaaccaggcatggttatcggctatattgttctgcgcggcgatggtccgatctctaatcgtgccatcttagcggaagaatatgatccacgcaaacataaatatgatgccgaatattatatcgaaaatcaggtgttaccagcagtgctgcgcattctggaaggctttggctatcgcaaagaagatttacgttggcagaaaaccaaacagacgggcctgacaagttggctgaatattaaaaaatcaggtacgggcggtggcggtgctacggttaaatttaaatataaaggcgaagaaaaagaagtggatattagtaaaatcaaaaaagtttggcgtgtgggcaaaatgatctctttcacttatgatgaaggcggcggcaaaaccggccgcggtgccgtgagcgaaaaagatgctcctaaagaactgttgcaaatgttagaaaaacagaaaaaaaattaa

SEQ ID NO: 309 - DNA, 2322 bp, Artificial Sequence
  Synthetic
atgattctggatgctgattacattacggaagatggcaagccgattattcgcctgttcaaaaaggaaaacggtcgcttcaaggtggaatacgatcgtaactttcgcccgtatatttacgctctgctgaaagatgacagcgcgatcgatgacgtgcgtaaaattacctctgaacgccacggcaaggtggttcgtgtcatcgatgtggaaaaggttaaaaagaaattcctgggtcgcccgatcgaagtgtggaaactgtatttcgaacatccgcaggatgttccggctatgcgtgacaaaattcgcgaacacccggcggttatcgatatttttgaatatgacatcccgttcgctaaacgttacctgatcgataagggcctgattccgatggagggtaacgaagaactgacctttctggcggtggacattgaaacgctgtaccatgaaggcgaagaattcggcaaaggtccgattatcatgatcagctatgcagatgaagaaggtgctaaagtcatcacctggaagaaaattgacctgccgtatgtggaagtcgtggccaatgaacgtgaaatgattaagcgcctgatcaaagttattcgcgaaaaagatccggacgtcattatcacgtataacggcgataattttgacttcccgtacctgctgaagcgtgccgaaaaactgggcatgaagctgccgctgggtcgcgataacagtgaaccgaaaatgcagcgtctgggcgactccctggcagttgaaatcaaaggtcgcattcattttgacctgtttccggtgatccgtcgcaccattaatctgccgacctatacgctggaagcggtttacgaagccatcttcggcaagcaaaaggaaaaggtctacccgcacgaaatcgcagaagcttgggaaaccggcaaaggtctggaacgtgtcgccaagtatagtatggaagatgcaaaagtgacgtacgaactgggcaaggaatttttcccgatggaagcacagctggctcgcctggtgggccaaccgctgtgggacgtttcccgtagctctaccggtaatctggtggaatggtatctgctgcgtaaagcgtatgaacgcaacgaactggcgccgaataaaccgtcgggccgcgaatacgatgaacgtcgcgaaggttatgcgggcggttacgttaaagaaccggaacgtggtctgtgggaaaacatcgtgtacctggattacaaaagtctgtatccgtccattatcattacccataacgtgagcccggacacgctgaatcgcgaaggctgcaaagaatacgatgtcgccccgcaagtgggtcacaaattttgtaaagactttccgggcttcattccgtctctgctgggtgatctgctggaagaacgtcagaaaattaaaaagaaaatgaaagcaaccaaagatccgattgagaaaaaactgctggactatcgtcaacgcgcgatcaaaattctggccaacagttattacggctattacggttatgcgaaagcccgctggtactgcaaagaatgtgcagaatccgttacggcttggggccgtgaatatatcgaaaccacgatccgcgaaatcgaagaaaaatacggtttcaaagtgctgtacgccgataccgacggcttccatgcaacgatcccgggtgaagatgctgaagaaattaagaaaaaagcgaaagaattcctgaaatacatcaacagcaaactgccgggcgccctggaactggaatatgaaggcttctaccgtcgcggctttttcgtgaccaagaaaaaatacgcagttatcgacgaagaaggcaaaattaccacgcgtggtctggaaatcgtgcgtcgcgattggagtgaaattgccaaagaaacccaggcacgtgtcctggaagcaatcctgaaacatggtgatgtggaagaagcggttcgcattgtcaaagaagtgacggaaaagctgtcgaaatatgaagttccgccggaaaaactggtcatccatgaacaaattacccgcgatctgcgtgactacaaagccacgggtccgcacgtggcagttgcaaaacgtctggcagcccgtggcgtgaagattcgtccgggtaccgtgatcagttatattgttctgaaaggctccggtcgcatcggtgaccgtgctattccgtttgatgaattcgacccgacgaaacaccgttacgatgccgaatattacatcgaaaatcaggtcctgccggccgtggaacgcattctgaaagcatttggttatcgcaaggaagatctgcgttaccagaagaccaaacaagtcggcctgggtgcgtggctgaaagtgaaaaagtaa

SEQ ID NO: 310 - DNA, 2328 bp, Artificial Sequence
  Synthetic
atgattctggatgctgattacattacggaagatggcaagccgattattcgcctgttcaaaaaggaaaacggtcgcttcaaggtggaatacgatcgtaactttcgcccgtatatttacgctctgctgaaagatgacagcgcgatcgatgacgtgcgtaaaattacctctgaacgccacggcaaggtggttcgtgtcatcgatgtggaaaaggttaaaaagaaattcctgggtcgcccgatcgaagtgtggaaactgtatttcgaacatccgcaggatgttccggctatgcgtgacaaaattcgcgaacacccggcggttatcgatatttttgaatatgacatcccgttcgctaaacgttacctgatcgataagggcctgattccgatggagggtaacgaagaactgacctttctggcggtggacattgaaacgctgtaccatgaaggcgaagaattcggcaaaggtccgattatcatgatcagctatgcagatgaagaaggtgctaaagtcatcacctggaagaaaattgacctgccgtatgtggaagtcgtggccaatgaacgtgaaatgattaagcgcctgatcaaagttattcgcgaaaaagatccggacgtcattatcacgtataacggcgataattttgacttcccgtacctgctgaagcgtgccgaaaaactgggcatgaagctgccgctgggtcgcgataacagtgaaccgaaaatgcagcgtctgggcgactccctggcagttgaaatcaaaggtcgcattcattttgacctgtttccggtgatccgtcgcaccattaatctgccgacctatacgctggaagcggtttacgaagccatcttcggcaagcaaaaggaaaaggtctacccgcacgaaatcgcagaagcttgggaaaccggcaaaggtctggaacgtgtcgccaagtatagtatggaagatgcaaaagtgacgtacgaactgggcaaggaatttttcccgatggaagcacagctggctcgcctggtgggccaaccgctgtgggacgtttcccgtagctctaccggtaatctggtggaatggtatctgctgcgtaaagcgtatgaacgcaacgaactggcgccgaataaaccgtcgggccgcgaatacgatgaacgtcgcgaaggttatgcgggcggttacgttaaagaaccggaacgtggtctgtgggaaaacatcgtgtacctggattacaaaagtctgtatccgtccattatcattacccataacgtgagcccggacacgctgaatcgcgaaggctgcaaagaatacgatgtcgccccgcaagtgggtcacaaattttgtaaagactttccgggcttcattccgtctctgctgggtgatctgctggaagaacgtcagaaaattaaaaagaaaatgaaagcaaccaaagatccgattgagaaaaaactgctggactatcgtcaacgcgcgatcaaaattctggccaacagttattacggctattacggttatgcgaaagcccgctggtactgcaaagaatgtgcagaatccgttacggcttggggccgtgaatatatcgaaaccacgatccgcgaaatcgaagaaaaatacggtttcaaagtgctgtacgccgataccgacggcttccatgcaacgatcccgggtgaagatgctgaagaaattaagaaaaaagcgaaagaattcctgaaatacatcaacagcaaactgccgggcgccctggaactggaatatgaaggcttctaccgtcgcggctttttcgtgaccaagaaaaaatacgcagttatcgacgaagaaggcaaaattaccacgcgtggtctggaaatcgtgcgtcgcgattggagtgaaattgccaaagaaacccaggcacgtgtgctggaagctctgctgaaagatggcaatgttgaagaagcggtttccattgtcaaagaagtgacggaaaagctgggtaaatatgaagtcccgccggaaaaactggtgatccatgaacaaattacccgcgaactgaaggattacaaagcgacgggcccgcacgttgctatcgcgaaacgtctggcagcgcgtggcgtgaagattcgtccgggtaccgttatcagctatattgtcctgaaaggctctggtcgtatcggtgaccgcgcgattccgtttgatgaattcgacccgacgaaacatcgctacgatgcagaatattacatcgaaaaccaggttctgccggctgtcgaacgtattctgaaagcgtttggctatcgtgccgaagatctgcgctaccagaaaacccgtcaagtgggcctgggtgtttggctgcaaccgaaaggtaagaaataa

SEQ ID NO: 311 - DNA, 2325 bp, Artificial Sequence
  Synthetic
atgattctggatgctgattacattacggaagatggcaagccgattattcgcctgttcaaaaaggaaaacggtcgcttcaaggtggaatacgatcgtaactttcgcccgtatatttacgctctgctgaaagatgacagcgcgatcgatgacgtgcgtaaaattacctctgaacgccacggcaaggtggttcgtgtcatcgatgtggaaaaggttaaaaagaaattcctgggtcgcccgatcgaagtgtggaaactgtatttcgaacatccgcaggatgttccggctatgcgtgacaaaattcgcgaacacccggcggttatcgatatttttgaatatgacatcccgttcgctaaacgttacctgatcgataagggcctgattccgatggagggtaacgaagaactgacctttctggcggtggacattgaaacgctgtaccatgaaggcgaagaattcggcaaaggtccgattatcatgatcagctatgcagatgaagaaggtgctaaagtcatcacctggaagaaaattgacctgccgtatgtggaagtcgtggccaatgaacgtgaaatgattaagcgcctgatcaaagttattcgcgaaaaagatccggacgtcattatcacgtataacggcgataattttgacttcccgtacctgctgaagcgtgccgaaaaactgggcatgaagctgccgctgggtcgcgataacagtgaaccgaaaatgcagcgtctgggcgactccctggcagttgaaatcaaaggtcgcattcattttgacctgtttccggtgatccgtcgcaccattaatctgccgacctatacgctggaagcggtttacgaagccatcttcggcaagcaaaaggaaaaggtctacccgcacgaaatcgcagaagcttgggaaaccggcaaaggtctggaacgtgtcgccaagtatagtatggaagatgcaaaagtgacgtacgaactgggcaaggaatttttcccgatggaagcacagctggctcgcctggtgggccaaccgctgtgggacgtttcccgtagctctaccggtaatctggtggaatggtatctgctgcgtaaagcgtatgaacgcaacgaactggcgccgaataaaccgtcgggccgcgaatacgatgaacgtcgcgaaggttatgcgggcggttacgttaaagaaccggaacgtggtctgtgggaaaacatcgtgtacctggattacaaaagtctgtatccgtccattatcattacccataacgtgagcccggacacgctgaatcgcgaaggctgcaaagaatacgatgtcgccccgcaagtgggtcacaaattttgtaaagactttccgggcttcattccgtctctgctgggtgatctgctggaagaacgtcagaaaattaaaaagaaaatgaaagcaaccaaagatccgattgagaaaaaactgctggactatcgtcaacgcgcgatcaaaattctggccaacagttattacggctattacggttatgcgaaagcccgctggtactgcaaagaatgtgcagaatccgttacggcttggggccgtgaatatatcgaaaccacgatccgcgaaatcgaagaaaaatacggtttcaaagtgctgtacgccgataccgacggcttccatgcaacgatcccgggtgaagatgctgaagaaattaagaaaaaagcgaaagaattcctgaaatacatcaacagcaaactgccgggcgccctggaactggaatatgaaggcttctaccgtcgcggctttttcgtgaccaagaaaaaatacgcagttatcgacgaagaaggcaaaattaccacgcgtggtctggaaatcgtgcgtcgcgattggagtgaaattgccaaagaaacccaggcaaaggttctggaagcaattctgaaacatggtaacgtcgaagaagcggtcaagatcgtgaaagaagttaccgaaaaactgtcgaattatgaaattccggtcgaaaagctggtgatctacgaacaaattacgcgcccgctgaacgaatataaagccattggcccgcacgtggcagttgctaaacgtctggcggccaagggtatcaagattaaaccgggcatggtgattggttatgttgtcctgcgcggcgatggtccgatcagcaaacgtgcgatcgccatcgaagaattcgatggcaaaaagcataagtacgacgcagaatactacatcgaaaatcaggttctgccggccgtcgaacgtatcctgaaagcattcggttataagcgtgaagatctgcgctggcagaagaccaaacaagtgggcctgggtgcgtggctgaaagttaaaaagtcttaa

SEQ ID NO: 312 - DNA, 2328 bp, Artificial Sequence
  Synthetic
atgattctggatgctgattacattacggaagatggcaagccgattattcgcctgttcaaaaaggaaaacggtcgcttcaaggtggaatacgatcgtaactttcgcccgtatatttacgctctgctgaaagatgacagcgcgatcgatgacgtgcgtaaaattacctctgaacgccacggcaaggtggttcgtgtcatcgatgtggaaaaggttaaaaagaaattcctgggtcgcccgatcgaagtgtggaaactgtatttcgaacatccgcaggatgttccggctatgcgtgacaaaattcgcgaacacccggcggttatcgatatttttgaatatgacatcccgttcgctaaacgttacctgatcgataagggcctgattccgatggagggtaacgaagaactgacctttctggcggtggacattgaaacgctgtaccatgaaggcgaagaattcggcaaaggtccgattatcatgatcagctatgcagatgaagaaggtgctaaagtcatcacctggaagaaaattgacctgccgtatgtggaagtcgtggccaatgaacgtgaaatgattaagcgcctgatcaaagttattcgcgaaaaagatccggacgtcattatcacgtataacggcgataattttgacttcccgtacctgctgaagcgtgccgaaaaactgggcatgaagctgccgctgggtcgcgataacagtgaaccgaaaatgcagcgtctgggcgactccctggcagttgaaatcaaaggtcgcattcattttgacctgtttccggtgatccgtcgcaccattaatctgccgacctatacgctggaagcggtttacgaagccatcttcggcaagcaaaaggaaaaggtctacccgcacgaaatcgcagaagcttgggaaaccggcaaaggtctggaacgtgtcgccaagtatagtatggaagatgcaaaagtgacgtacgaactgggcaaggaatttttcccgatggaagcacagctggctcgcctggtgggccaaccgctgtgggacgtttcccgtagctctaccggtaatctggtggaatggtatctgctgcgtaaagcgtatgaacgcaacgaactggcgccgaataaaccgtcgggccgcgaatacgatgaacgtcgcgaaggttatgcgggcggttacgttaaagaaccggaacgtggtctgtgggaaaacatcgtgtacctggattacaaaagtctgtatccgtccattatcattacccataacgtgagcccggacacgctgaatcgcgaaggctgcaaagaatacgatgtcgccccgcaagtgggtcacaaattttgtaaagactttccgggcttcattccgtctctgctgggtgatctgctggaagaacgtcagaaaattaaaaagaaaatgaaagcaaccaaagatccgattgagaaaaaactgctggactatcgtcaacgcgcgatcaaaattctggccaacagttattacggctattacggttatgcgaaagcccgctggtactgcaaagaatgtgcagaatccgttacggcttggggccgtgaatatatcgaaaccacgatccgcgaaatcgaagaaaaatacggtttcaaagtgctgtacgccgataccgacggcttccatgcaacgatcccgggtgaagatgctgaagaaattaagaaaaaagcgaaagaattcctgaaatacatcaacagcaaactgccgggcgccctggaactggaatatgaaggcttctaccgtcgcggctttttcgtgaccaagaaaaaatacgcagttatcgacgaagaaggcaaaattaccacgcgtggtctggaaatcgtgcgtcgcgattggagtgaaattgccaaagaaacccaggcacgtgttctggaagcactgctgaaagatggtaatgtcgaagaagcagtgagtattgttaaagaagtcacggaaaaactgtccaagtatgaagtcccgccggaaaaactggtgattcatgaacaaatcacccgcgaactgaaagattacaaggcgacgggcccgcacgtggcaattgctaaacgtctggcagcgcgtggcgttaagatccgtccgggtaccgttattagctatatcgtcctgaaaggctctggtcgtattggtgaccgcgccatcccgtttgatgaattcgacccggctaaacaccgctacgatgcggaatattacattgaaaatcaggtcctgccggctgtggaacgtatcctgaaagcgtttggctatcgtaaggaagatctgcgctaccagaaaacccgtcaagtgggcctgggtgcgtggctgaaaccgaagggtaaaaagtaa

SEQ ID NO: 313 - DNA, 2328 bp, Artificial Sequence
  Synthetic
atgattctggatgctgattacattacggaagatggcaagccgattattcgcctgttcaaaaaggaaaacggtcgcttcaaggtggaatacgatcgtaactttcgcccgtatatttacgctctgctgaaagatgacagcgcgatcgatgacgtgcgtaaaattacctctgaacgccacggcaaggtggttcgtgtcatcgatgtggaaaaggttaaaaagaaattcctgggtcgcccgatcgaagtgtggaaactgtatttcgaacatccgcaggatgttccggctatgcgtgacaaaattcgcgaacacccggcggttatcgatatttttgaatatgacatcccgttcgctaaacgttacctgatcgataagggcctgattccgatggagggtaacgaagaactgacctttctggcggtggacattgaaacgctgtaccatgaaggcgaagaattcggcaaaggtccgattatcatgatcagctatgcagatgaagaaggtgctaaagtcatcacctggaagaaaattgacctgccgtatgtggaagtcgtggccaatgaacgtgaaatgattaagcgcctgatcaaagttattcgcgaaaaagatccggacgtcattatcacgtataacggcgataattttgacttcccgtacctgctgaagcgtgccgaaaaactgggcatgaagctgccgctgggtcgcgataacagtgaaccgaaaatgcagcgtctgggcgactccctggcagttgaaatcaaaggtcgcattcattttgacctgtttccggtgatccgtcgcaccattaatctgccgacctatacgctggaagcggtttacgaagccatcttcggcaagcaaaaggaaaaggtctacccgcacgaaatcgcagaagcttgggaaaccggcaaaggtctggaacgtgtcgccaagtatagtatggaagatgcaaaagtgacgtacgaactgggcaaggaatttttcccgatggaagcacagctggctcgcctggtgggccaaccgctgtgggacgtttcccgtagctctaccggtaatctggtggaatggtatctgctgcgtaaagcgtatgaacgcaacgaactggcgccgaataaaccgtcgggccgcgaatacgatgaacgtcgcgaaggttatgcgggcggttacgttaaagaaccggaacgtggtctgtgggaaaacatcgtgtacctggattacaaaagtctgtatccgtccattatcattacccataacgtgagcccggacacgctgaatcgcgaaggctgcaaagaatacgatgtcgccccgcaagtgggtcacaaattttgtaaagactttccgggcttcattccgtctctgctgggtgatctgctggaagaacgtcagaaaattaaaaagaaaatgaaagcaaccaaagatccgattgagaaaaaactgctggactatcgtcaacgcgcgatcaaaattctggccaacagttattacggctattacggttatgcgaaagcccgctggtactgcaaagaatgtgcagaatccgttacggcttggggccgtgaatatatcgaaaccacgatccgcgaaatcgaagaaaaatacggtttcaaagtgctgtacgccgataccgacggcttccatgcaacgatcccgggtgaagatgctgaagaaattaagaaaaaagcgaaagaattcctgaaatacatcaacagcaaactgccgggcgccctggaactggaatatgaaggcttctaccgtcgcggctttttcgtgaccaagaaaaaatacgcagttatcgacgaagaaggcaaaattaccacgcgtggtctggaaatcgtgcgtcgcgattggagtgaaattgccaaagaaacccaggcacgcgtcctggaagcaatcctgaaagatggtgacgtggaagaagccgtccgtattgtgaaagaagttacggaaaaactgtccaaatatgaagttccgccggaaaaactggtcatccatgaacaaattacccgcgaactgaaagattacaaagcgacgggcccgcacgtcgcaatcgctaaacgtctggcggcgcgtggcgtgaaaattcgtccgggtaccgtgatctcatatattgttctgaaaggctcgggtcgtatcggtgaccgcgctattccgtttgatgaattcgacccgaaaaaacacaaatacgatgcggaatactacatcgaaaaccaggttctgccggccgtcgaacgtattctgcgcgcatttggctaccgtaaagaagatctgcgttatcaaaaaaccaaacaagtgggtctgggtgcgtggctgaaaccgaaaggtaaaaaataa

SEQ ID NO: 314 - DNA, 2325 bp, Artificial Sequence
  Synthetic
atgattctggatgctgattacattacggaagatggcaagccgattattcgcctgttcaaaaaggaaaacggtcgcttcaaggtggaatacgatcgtaactttcgcccgtatatttacgctctgctgaaagatgacagcgcgatcgatgacgtgcgtaaaattacctctgaacgccacggcaaggtggttcgtgtcatcgatgtggaaaaggttaaaaagaaattcctgggtcgcccgatcgaagtgtggaaactgtatttcgaacatccgcaggatgttccggctatgcgtgacaaaattcgcgaacacccggcggttatcgatatttttgaatatgacatcccgttcgctaaacgttacctgatcgataagggcctgattccgatggagggtaacgaagaactgacctttctggcggtggacattgaaacgctgtaccatgaaggcgaagaattcggcaaaggtccgattatcatgatcagctatgcagatgaagaaggtgctaaagtcatcacctggaagaaaattgacctgccgtatgtggaagtcgtggccaatgaacgtgaaatgattaagcgcctgatcaaagttattcgcgaaaaagatccggacgtcattatcacgtataacggcgataattttgacttcccgtacctgctgaagcgtgccgaaaaactgggcatgaagctgccgctgggtcgcgataacagtgaaccgaaaatgcagcgtctgggcgactccctggcagttgaaatcaaaggtcgcattcattttgacctgtttccggtgatccgtcgcaccattaatctgccgacctatacgctggaagcggtttacgaagccatcttcggcaagcaaaaggaaaaggtctacccgcacgaaatcgcagaagcttgggaaaccggcaaaggtctggaacgtgtcgccaagtatagtatggaagatgcaaaagtgacgtacgaactgggcaaggaatttttcccgatggaagcacagctggctcgcctggtgggccaaccgctgtgggacgtttcccgtagctctaccggtaatctggtggaatggtatctgctgcgtaaagcgtatgaacgcaacgaactggcgccgaataaaccgtcgggccgcgaatacgatgaacgtcgcgaaggttatgcgggcggttacgttaaagaaccggaacgtggtctgtgggaaaacatcgtgtacctggattacaaaagtctgtatccgtccattatcattacccataacgtgagcccggacacgctgaatcgcgaaggctgcaaagaatacgatgtcgccccgcaagtgggtcacaaattttgtaaagactttccgggcttcattccgtctctgctgggtgatctgctggaagaacgtcagaaaattaaaaagaaaatgaaagcaaccaaagatccgattgagaaaaaactgctggactatcgtcaacgcgcgatcaaaattctggccaacagttattacggctattacggttatgcgaaagcccgctggtactgcaaagaatgtgcagaatccgttacggcttggggccgtgaatatatcgaaaccacgatccgcgaaatcgaagaaaaatacggtttcaaagtgctgtacgccgataccgacggcttccatgcaacgatcccgggtgaagatgctgaagaaattaagaaaaaagcgaaagaattcctgaaatacatcaacagcaaactgccgggcgccctggaactggaatatgaaggcttctaccgtcgcggctttttcgtgaccaagaaaaaatacgcagttatcgacgaagaaggcaaaattaccacgcgtggtctggaaatcgtgcgtcgcgattggagtgaaattgccaaagaaacccaggcacgtgttctggaagcaattctgaaacatggtaacgtcgaagaagcggtcaaaatcgtgaaagaagttacggaaaaactgtctaactacgaaattccgccggaaaaactggccatctacgaacaaattacccgcccgctgcatgaatataaagcaatcggtccgcacgtcgcagtggcaaaacgtctggcagcacgcggcgttaaagtcaaaccgggtatggtcatcggctatattgtgctgcgtggtgatggcccgatcagcaaccgcgcaattctggctgaagaatacgatctgaaaaaacacaaatacgacgccgaatattacatcgaaaatcaggttctgccggctgtcctgcgtattctggaagcgtttggctatcgtaaagaagatctgcgctggcagaaaacccgtcaaacgggtctgacctcatggctgaatattaaaaaatcgtaa

SEQ ID NO: 315 - DNA, 2325 bp, Artificial Sequence
  Synthetic
atgattctggatgctgattacattacggaagatggcaagccgattattcgcctgttcaaaaaggaaaacggtcgcttcaaggtggaatacgatcgtaactttcgcccgtatatttacgctctgctgaaagatgacagcgcgatcgatgacgtgcgtaaaattacctctgaacgccacggcaaggtggttcgtgtcatcgatgtggaaaaggttaaaaagaaattcctgggtcgcccgatcgaagtgtggaaactgtatttcgaacatccgcaggatgttccggctatgcgtgacaaaattcgcgaacacccggcggttatcgatatttttgaatatgacatcccgttcgctaaacgttacctgatcgataagggcctgattccgatggagggtaacgaagaactgacctttctggcggtggacattgaaacgctgtaccatgaaggcgaagaattcggcaaaggtccgattatcatgatcagctatgcagatgaagaaggtgctaaagtcatcacctggaagaaaattgacctgccgtatgtggaagtcgtggccaatgaacgtgaaatgattaagcgcctgatcaaagttattcgcgaaaaagatccggacgtcattatcacgtataacggcgataattttgacttcccgtacctgctgaagcgtgccgaaaaactgggcatgaagctgccgctgggtcgcgataacagtgaaccgaaaatgcagcgtctgggcgactccctggcagttgaaatcaaaggtcgcattcattttgacctgtttccggtgatccgtcgcaccattaatctgccgacctatacgctggaagcggtttacgaagccatcttcggcaagcaaaaggaaaaggtctacccgcacgaaatcgcagaagcttgggaaaccggcaaaggtctggaacgtgtcgccaagtatagtatggaagatgcaaaagtgacgtacgaactgggcaaggaatttttcccgatggaagcacagctggctcgcctggtgggccaaccgctgtgggacgtttcccgtagctctaccggtaatctggtggaatggtatctgctgcgtaaagcgtatgaacgcaacgaactggcgccgaataaaccgtcgggccgcgaatacgatgaacgtcgcgaaggttatgcgggcggttacgttaaagaaccggaacgtggtctgtgggaaaacatcgtgtacctggattacaaaagtctgtatccgtccattatcattacccataacgtgagcccggacacgctgaatcgcgaaggctgcaaagaatacgatgtcgccccgcaagtgggtcacaaattttgtaaagactttccgggcttcattccgtctctgctgggtgatctgctggaagaacgtcagaaaattaaaaagaaaatgaaagcaaccaaagatccgattgagaaaaaactgctggactatcgtcaacgcgcgatcaaaattctggccaacagttattacggctattacggttatgcgaaagcccgctggtactgcaaagaatgtgcagaatccgttacggcttggggccgtgaatatatcgaaaccacgatccgcgaaatcgaagaaaaatacggtttcaaagtgctgtacgccgataccgacggcttccatgcaacgatcccgggtgaagatgctgaagaaattaagaaaaaagcgaaagaattcctgaaatacatcaacagcaaactgccgggcgccctggaactggaatatgaaggcttctaccgtcgcggctttttcgtgaccaagaaaaaatacgcagttatcgacgaagaaggcaaaattaccacgcgtggtctggaaatcgtgcgtcgcgattggagtgaaattgccaaagaaacccaggcaaaagttctggaagcaatcctgaaacatggtaatgtcgaagaagcagtgaaaattgtcaaggaagtgacggaaaaactgtcgaagtatgaaatcccgccggaaaaactggtgatctacgaacaaattacccgcccgctgcatgaatataaagcgattggcccgcacgtggcagttgctaaacgtctggcagcccgcggtgtcaaagtgcgtccgggcatggtgatcggttatattgttctgcgtggcgatggtccgatcagtaaacgcgcgattctggccgaagaatttgatccgcgcaaacacaagtacgacgccgaatattacatcgaaaaccaggtgctgccggctgttctgcgtattctggaagcgttcggctatcgtaaagaagatctgcgctggcagaaaaccaagcaaacgggtctgaccgcatggctgaatgtgaaaaagaaataa

SEQ ID NO: 316 - DNA, 2331 bp, Artificial Sequence
  Synthetic
atgattctggatgctgattacattacggaagatggcaagccgattattcgcctgttcaaaaaggaaaacggtcgcttcaaggtggaatacgatcgtaactttcgcccgtatatttacgctctgctgaaagatgacagcgcgatcgatgacgtgcgtaaaattacctctgaacgccacggcaaggtggttcgtgtcatcgatgtggaaaaggttaaaaagaaattcctgggtcgcccgatcgaagtgtggaaactgtatttcgaacatccgcaggatgttccggctatgcgtgacaaaattcgcgaacacccggcggttatcgatatttttgaatatgacatcccgttcgctaaacgttacctgatcgataagggcctgattccgatggagggtaacgaagaactgacctttctggcggtggacattgaaacgctgtaccatgaaggcgaagaattcggcaaaggtccgattatcatgatcagctatgcagatgaagaaggtgctaaagtcatcacctggaagaaaattgacctgccgtatgtggaagtcgtggccaatgaacgtgaaatgattaagcgcctgatcaaagttattcgcgaaaaagatccggacgtcattatcacgtataacggcgataattttgacttcccgtacctgctgaagcgtgccgaaaaactgggcatgaagctgccgctgggtcgcgataacagtgaaccgaaaatgcagcgtctgggcgactccctggcagttgaaatcaaaggtcgcattcattttgacctgtttccggtgatccgtcgcaccattaatctgccgacctatacgctggaagcggtttacgaagccatcttcggcaagcaaaaggaaaaggtctacccgcacgaaatcgcagaagcttgggaaaccggcaaaggtctggaacgtgtcgccaagtatagtatggaagatgcaaaagtgacgtacgaactgggcaaggaatttttcccgatggaagcacagctggctcgcctggtgggccaaccgctgtgggacgtttcccgtagctctaccggtaatctggtggaatggtatctgctgcgtaaagcgtatgaacgcaacgaactggcaccgaataaaccggatgaacgtgaatatgaacgtcgcctgcgcgaatcttatgccggcggttacgttaaggaaccggaaaaaggcctgtgggaaggtctggtgtctctggattttcgctcactgtacccgtcgattatcattacgcataacgtgtccccggacaccctgaatcgtgaaggctgcatggaatatgatgttgctccggaagtcaaacacaagttttgtaaagactttccgggtttcattccgtcactgctgaaacgtctgctggatgaacgccaggaaatcaaacgtcgcatgaaagcctcgaaggatccgattgaaaagaaaatgctggactatcgtcaacgcgcaatcaaaattctggctaatagctattacggctattacggttatgcgaaggcccgctggtactgcaaagaatgtgcggaatctgtcacggcctggggccgtgaatatatcgaatttgtgcgcaaagaactggaagaaaagttcggtttcaaggttctgtacattgatacggacggcctgtacgcaaccatcccgggtgctaaaccggaagaaattaagcgtaaggccctggaatttgtggaatacatcaacgcaaaactgccgggcctgctggaactggaatatgaaggcttctacgttcgcggctttttcgtcacgaagaaaaagtatgcgctgattgacgaagaaggcaaaatcattacccgtggtctggaaatcgttcgtcgcgattggagtgaaattgccaaagaaacccaggcacgcgttctggaagcaatcctgcgtcatggtgacgtcgaagaagccgttcgcattgtcaaagatgtgacggaaaagctgtcgaaatatgaagtcccgccggaaaaactggtgatccatgaacaaattacccgtgaactgaaggattacaaagcgacgggcccgcacgttgcaattgctaaacgcctggcagcccgtggcatcaagattcgtccgggtaccgttatcagctatattgtcctgaaaggctctggtcgcatcggtgatcgtgctattccgtttgatgaattcgacccgacgaaacaccgttacgatgccgaatattacatcgaaaatcaggtgctgccggccgttgaacgcattctgaaagcatttggctataagaaagaagaactgcgctaccagaaaacccgtcaagtgggcctgggtgcgtggctgaagctgaaaggtaagaaataa

SEQ ID NO: 317 - DNA, 2325 bp, Artificial Sequence
  Synthetic
atgattctggatgctgattacattacggaagatggcaagccgattattcgcctgttcaaaaaggaaaacggtcgcttcaaggtggaatacgatcgtaactttcgcccgtatatttacgctctgctgaaagatgacagcgcgatcgatgacgtgcgtaaaattacctctgaacgccacggcaaggtggttcgtgtcatcgatgtggaaaaggttaaaaagaaattcctgggtcgcccgatcgaagtgtggaaactgtatttcgaacatccgcaggatgttccggctatgcgtgacaaaattcgcgaacacccggcggttatcgatatttttgaatatgacatcccgttcgctaaacgttacctgatcgataagggcctgattccgatggagggtaacgaagaactgacctttctggcggtggacattgaaacgctgtaccatgaaggcgaagaattcggcaaaggtccgattatcatgatcagctatgcagatgaagaaggtgctaaagtcatcacctggaagaaaattgacctgccgtatgtggaagtcgtggccaatgaacgtgaaatgattaagcgcctgatcaaagttattcgcgaaaaagatccggacgtcattatcacgtataacggcgataattttgacttcccgtacctgctgaagcgtgccgaaaaactgggcatgaagctgccgctgggtcgcgataacagtgaaccgaaaatgcagcgtctgggcgactccctggcagttgaaatcaaaggtcgcattcattttgacctgtttccggtgatccgtcgcaccattaatctgccgacctatacgctggaagcggtttacgaagccatcttcggcaagcaaaaggaaaaggtctacccgcacgaaatcgcagaagcttgggaaaccggcaaaggtctggaacgtgtcgccaagtatagtatggaagatgcaaaagtgacgtacgaactgggcaaggaatttttcccgatggaagcacagctggctcgcctggtgggccaaccgctgtgggacgtttcccgtagctctaccggtaatctggtggaatggtatctgctgcgtaaagcgtatgaacgcaacgaactggcaccgaataaaccggatgaacgtgaatatgaacgtcgcctgcgcgaatcttatgccggcggttacgttaaggaaccggaaaaaggcctgtgggaaggtctggtgtctctggattttcgctcactgtacccgtcgattatcattacgcataacgtgtccccggacaccctgaatcgtgaaggctgcatggaatatgatgttgctccggaagtcaaacacaagttttgtaaagactttccgggtttcattccgtcactgctgaaacgtctgctggatgaacgccaggaaatcaaacgtcgcatgaaagcctcgaaggatccgattgaaaagaaaatgctggactatcgtcaacgcgcaatcaaaattctggctaatagctattacggctattacggttatgcgaaggcccgctggtactgcaaagaatgtgcggaatctgtcacggcctggggccgtgaatatatcgaatttgtgcgcaaagaactggaagaaaagttcggtttcaaggttctgtacattgatacggacggcctgtacgcaaccatcccgggtgctaaaccggaagaaattaagcgtaaggccctggaatttgtggaatacatcaacgcaaaactgccgggcctgctggaactggaatatgaaggcttctacgttcgcggctttttcgtcacgaagaaaaagtatgcgctgattgacgaagaaggcaaaatcattacccgtggtctggaaatcgttcgtcgcgattggagtgaaattgccaaagaaacccaggcacgtgtcctggaagcaatcctgaaacatggtgatgtggaagaagcggttcgcattgtcaaagaagtgacggaaaagctgtcgaaatatgaagttccgccggaaaaactggtcatccatgaacaaattacccgcgatctgcgtgactacaaagccacgggtccgcacgtggcagttgcaaaacgtctggcagcccgtggcgtgaagattcgtccgggtaccgtgatcagttatattgttctgaaaggctccggtcgcatcggtgaccgtgctattccgtttgatgaattcgacccgacgaaacaccgttacgatgccgaatattacatcgaaaatcaggtcctgccggccgtggaacgcattctgaaagcatttggttatcgcaaggaagatctgcgttaccagaagaccaaacaagtcggcctgggtgcgtggctgaaagtgaaaaagtaa

SEQ ID NO: 318 - DNA, 2331 bp, Artificial Sequence
  Synthetic
atgattctggatgctgattacattacggaagatggcaagccgattattcgcctgttcaaaaaggaaaacggtcgcttcaaggtggaatacgatcgtaactttcgcccgtatatttacgctctgctgaaagatgacagcgcgatcgatgacgtgcgtaaaattacctctgaacgccacggcaaggtggttcgtgtcatcgatgtggaaaaggttaaaaagaaattcctgggtcgcccgatcgaagtgtggaaactgtatttcgaacatccgcaggatgttccggctatgcgtgacaaaattcgcgaacacccggcggttatcgatatttttgaatatgacatcccgttcgctaaacgttacctgatcgataagggcctgattccgatggagggtaacgaagaactgacctttctggcggtggacattgaaacgctgtaccatgaaggcgaagaattcggcaaaggtccgattatcatgatcagctatgcagatgaagaaggtgctaaagtcatcacctggaagaaaattgacctgccgtatgtggaagtcgtggccaatgaacgtgaaatgattaagcgcctgatcaaagttattcgcgaaaaagatccggacgtcattatcacgtataacggcgataattttgacttcccgtacctgctgaagcgtgccgaaaaactgggcatgaagctgccgctgggtcgcgataacagtgaaccgaaaatgcagcgtctgggcgactccctggcagttgaaatcaaaggtcgcattcattttgacctgtttccggtgatccgtcgcaccattaatctgccgacctatacgctggaagcggtttacgaagccatcttcggcaagcaaaaggaaaaggtctacccgcacgaaatcgcagaagcttgggaaaccggcaaaggtctggaacgtgtcgccaagtatagtatggaagatgcaaaagtgacgtacgaactgggcaaggaatttttcccgatggaagcacagctggctcgcctggtgggccaaccgctgtgggacgtttcccgtagctctaccggtaatctggtggaatggtatctgctgcgtaaagcgtatgaacgcaacgaactggcaccgaataaaccggatgaacgtgaatatgaacgtcgcctgcgcgaatcttatgccggcggttacgttaaggaaccggaaaaaggcctgtgggaaggtctggtgtctctggattttcgctcactgtacccgtcgattatcattacgcataacgtgtccccggacaccctgaatcgtgaaggctgcatggaatatgatgttgctccggaagtcaaacacaagttttgtaaagactttccgggtttcattccgtcactgctgaaacgtctgctggatgaacgccaggaaatcaaacgtcgcatgaaagcctcgaaggatccgattgaaaagaaaatgctggactatcgtcaacgcgcaatcaaaattctggctaatagctattacggctattacggttatgcgaaggcccgctggtactgcaaagaatgtgcggaatctgtcacggcctggggccgtgaatatatcgaatttgtgcgcaaagaactggaagaaaagttcggtttcaaggttctgtacattgatacggacggcctgtacgcaaccatcccgggtgctaaaccggaagaaattaagcgtaaggccctggaatttgtggaatacatcaacgcaaaactgccgggcctgctggaactggaatatgaaggcttctacgttcgcggctttttcgtcacgaagaaaaagtatgcgctgattgacgaagaaggcaaaatcattacccgtggtctggaaatcgttcgtcgcgattggagtgaaattgccaaagaaacccaggcacgtgtgctggaagctctgctgaaagatggcaatgttgaagaagcggtttccattgtcaaagaagtgacggaaaagctgggtaaatatgaagtcccgccggaaaaactggtgatccatgaacaaattacccgcgaactgaaggattacaaagcgacgggcccgcacgttgctatcgcgaaacgtctggcagcgcgtggcgtgaagattcgtccgggtaccgttatcagctatattgtcctgaaaggctctggtcgtatcggtgaccgcgcgattccgtttgatgaattcgacccgacgaaacatcgctacgatgcagaatattacatcgaaaaccaggttctgccggctgtcgaacgtattctgaaagcgtttggctatcgtgccgaagatctgcgctaccagaaaacccgtcaagtgggcctgggtgtttggctgcaaccgaaaggtaagaaataa

SEQ ID NO: 319 - DNA, 2328 bp, Artificial Sequence
  Synthetic
atgattctggatgctgattacattacggaagatggcaagccgattattcgcctgttcaaaaaggaaaacggtcgcttcaaggtggaatacgatcgtaactttcgcccgtatatttacgctctgctgaaagatgacagcgcgatcgatgacgtgcgtaaaattacctctgaacgccacggcaaggtggttcgtgtcatcgatgtggaaaaggttaaaaagaaattcctgggtcgcccgatcgaagtgtggaaactgtatttcgaacatccgcaggatgttccggctatgcgtgacaaaattcgcgaacacccggcggttatcgatatttttgaatatgacatcccgttcgctaaacgttacctgatcgataagggcctgattccgatggagggtaacgaagaactgacctttctggcggtggacattgaaacgctgtaccatgaaggcgaagaattcggcaaaggtccgattatcatgatcagctatgcagatgaagaaggtgctaaagtcatcacctggaagaaaattgacctgccgtatgtggaagtcgtggccaatgaacgtgaaatgattaagcgcctgatcaaagttattcgcgaaaaagatccggacgtcattatcacgtataacggcgataattttgacttcccgtacctgctgaagcgtgccgaaaaactgggcatgaagctgccgctgggtcgcgataacagtgaaccgaaaatgcagcgtctgggcgactccctggcagttgaaatcaaaggtcgcattcattttgacctgtttccggtgatccgtcgcaccattaatctgccgacctatacgctggaagcggtttacgaagccatcttcggcaagcaaaaggaaaaggtctacccgcacgaaatcgcagaagcttgggaaaccggcaaaggtctggaacgtgtcgccaagtatagtatggaagatgcaaaagtgacgtacgaactgggcaaggaatttttcccgatggaagcacagctggctcgcctggtgggccaaccgctgtgggacgtttcccgtagctctaccggtaatctggtggaatggtatctgctgcgtaaagcgtatgaacgcaacgaactggcaccgaataaaccggatgaacgtgaatatgaacgtcgcctgcgcgaatcttatgccggcggttacgttaaggaaccggaaaaaggcctgtgggaaggtctggtgtctctggattttcgctcactgtacccgtcgattatcattacgcataacgtgtccccggacaccctgaatcgtgaaggctgcatggaatatgatgttgctccggaagtcaaacacaagttttgtaaagactttccgggtttcattccgtcactgctgaaacgtctgctggatgaacgccaggaaatcaaacgtcgcatgaaagcctcgaaggatccgattgaaaagaaaatgctggactatcgtcaacgcgcaatcaaaattctggctaatagctattacggctattacggttatgcgaaggcccgctggtactgcaaagaatgtgcggaatctgtcacggcctggggccgtgaatatatcgaatttgtgcgcaaagaactggaagaaaagttcggtttcaaggttctgtacattgatacggacggcctgtacgcaaccatcccgggtgctaaaccggaagaaattaagcgtaaggccctggaatttgtggaatacatcaacgcaaaactgccgggcctgctggaactggaatatgaaggcttctacgttcgcggctttttcgtcacgaagaaaaagtatgcgctgattgacgaagaaggcaaaatcattacccgtggtctggaaatcgttcgtcgcgattggagtgaaattgccaaagaaacccaggcaaaggttctggaagcaattctgaaacatggtaacgtcgaagaagcggtcaagatcgtgaaagaagttaccgaaaaactgtcgaattatgaaattccggtcgaaaagctggtgatctacgaacaaattacgcgcccgctgaacgaatataaagccattggcccgcacgtggcagttgctaaacgtctggcggccaagggtatcaagattaaaccgggcatggtgattggttatgttgtcctgcgcggcgatggtccgatcagcaaacgtgcgatcgccatcgaagaattcgatggcaaaaagcataagtacgacgcagaatactacatcgaaaatcaggttctgccggccgtcgaacgtatcctgaaagcattcggttataagcgtgaagatctgcgctggcagaagaccaaacaagtgggcctgggtgcgtggctgaaagttaaaaagtcttaa

SEQ ID NO: 320 - DNA, 2331 bp, Artificial Sequence
  Synthetic
atgattctggatgctgattacattacggaagatggcaagccgattattcgcctgttcaaaaaggaaaacggtcgcttcaaggtggaatacgatcgtaactttcgcccgtatatttacgctctgctgaaagatgacagcgcgatcgatgacgtgcgtaaaattacctctgaacgccacggcaaggtggttcgtgtcatcgatgtggaaaaggttaaaaagaaattcctgggtcgcccgatcgaagtgtggaaactgtatttcgaacatccgcaggatgttccggctatgcgtgacaaaattcgcgaacacccggcggttatcgatatttttgaatatgacatcccgttcgctaaacgttacctgatcgataagggcctgattccgatggagggtaacgaagaactgacctttctggcggtggacattgaaacgctgtaccatgaaggcgaagaattcggcaaaggtccgattatcatgatcagctatgcagatgaagaaggtgctaaagtcatcacctggaagaaaattgacctgccgtatgtggaagtcgtggccaatgaacgtgaaatgattaagcgcctgatcaaagttattcgcgaaaaagatccggacgtcattatcacgtataacggcgataattttgacttcccgtacctgctgaagcgtgccgaaaaactgggcatgaagctgccgctgggtcgcgataacagtgaaccgaaaatgcagcgtctgggcgactccctggcagttgaaatcaaaggtcgcattcattttgacctgtttccggtgatccgtcgcaccattaatctgccgacctatacgctggaagcggtttacgaagccatcttcggcaagcaaaaggaaaaggtctacccgcacgaaatcgcagaagcttgggaaaccggcaaaggtctggaacgtgtcgccaagtatagtatggaagatgcaaaagtgacgtacgaactgggcaaggaatttttcccgatggaagcacagctggctcgcctggtgggccaaccgctgtgggacgtttcccgtagctctaccggtaatctggtggaatggtatctgctgcgtaaagcgtatgaacgcaacgaactggcaccgaataaaccggatgaacgtgaatatgaacgtcgcctgcgcgaatcttatgccggcggttacgttaaggaaccggaaaaaggcctgtgggaaggtctggtgtctctggattttcgctcactgtacccgtcgattatcattacgcataacgtgtccccggacaccctgaatcgtgaaggctgcatggaatatgatgttgctccggaagtcaaacacaagttttgtaaagactttccgggtttcattccgtcactgctgaaacgtctgctggatgaacgccaggaaatcaaacgtcgcatgaaagcctcgaaggatccgattgaaaagaaaatgctggactatcgtcaacgcgcaatcaaaattctggctaatagctattacggctattacggttatgcgaaggcccgctggtactgcaaagaatgtgcggaatctgtcacggcctggggccgtgaatatatcgaatttgtgcgcaaagaactggaagaaaagttcggtttcaaggttctgtacattgatacggacggcctgtacgcaaccatcccgggtgctaaaccggaagaaattaagcgtaaggccctggaatttgtggaatacatcaacgcaaaactgccgggcctgctggaactggaatatgaaggcttctacgttcgcggctttttcgtcacgaagaaaaagtatgcgctgattgacgaagaaggcaaaatcattacccgtggtctggaaatcgttcgtcgcgattggagtgaaattgccaaagaaacccaggcacgtgttctggaagcactgctgaaagatggtaatgtcgaagaagcagtgagtattgttaaagaagtcacggaaaaactgtccaagtatgaagtcccgccggaaaaactggtgattcatgaacaaatcacccgcgaactgaaagattacaaggcgacgggcccgcacgtggcaattgctaaacgtctggcagcgcgtggcgttaagatccgtccgggtaccgttattagctatatcgtcctgaaaggctctggtcgtattggtgaccgcgccatcccgtttgatgaattcgacccggctaaacaccgctacgatgcggaatattacattgaaaatcaggtcctgccggctgtggaacgtatcctgaaagcgtttggctatcgtaaggaagatctgcgctaccagaaaacccgtcaagtgggcctgggtgcgtggctgaaaccgaagggtaaaaagtaa

SEQ ID NO: 321 - DNA, 2331 bp, Artificial Sequence
  Synthetic
atgattctggatgctgattacattacggaagatggcaagccgattattcgcctgttcaaaaaggaaaacggtcgcttcaaggtggaatacgatcgtaactttcgcccgtatatttacgctctgctgaaagatgacagcgcgatcgatgacgtgcgtaaaattacctctgaacgccacggcaaggtggttcgtgtcatcgatgtggaaaaggttaaaaagaaattcctgggtcgcccgatcgaagtgtggaaactgtatttcgaacatccgcaggatgttccggctatgcgtgacaaaattcgcgaacacccggcggttatcgatatttttgaatatgacatcccgttcgctaaacgttacctgatcgataagggcctgattccgatggagggtaacgaagaactgacctttctggcggtggacattgaaacgctgtaccatgaaggcgaagaattcggcaaaggtccgattatcatgatcagctatgcagatgaagaaggtgctaaagtcatcacctggaagaaaattgacctgccgtatgtggaagtcgtggccaatgaacgtgaaatgattaagcgcctgatcaaagttattcgcgaaaaagatccggacgtcattatcacgtataacggcgataattttgacttcccgtacctgctgaagcgtgccgaaaaactgggcatgaagctgccgctgggtcgcgataacagtgaaccgaaaatgcagcgtctgggcgactccctggcagttgaaatcaaaggtcgcattcattttgacctgtttccggtgatccgtcgcaccattaatctgccgacctatacgctggaagcggtttacgaagccatcttcggcaagcaaaaggaaaaggtctacccgcacgaaatcgcagaagcttgggaaaccggcaaaggtctggaacgtgtcgccaagtatagtatggaagatgcaaaagtgacgtacgaactgggcaaggaatttttcccgatggaagcacagctggctcgcctggtgggccaaccgctgtgggacgtttcccgtagctctaccggtaatctggtggaatggtatctgctgcgtaaagcgtatgaacgcaacgaactggcaccgaataaaccggatgaacgtgaatatgaacgtcgcctgcgcgaatcttatgccggcggttacgttaaggaaccggaaaaaggcctgtgggaaggtctggtgtctctggattttcgctcactgtacccgtcgattatcattacgcataacgtgtccccggacaccctgaatcgtgaaggctgcatggaatatgatgttgctccggaagtcaaacacaagttttgtaaagactttccgggtttcattccgtcactgctgaaacgtctgctggatgaacgccaggaaatcaaacgtcgcatgaaagcctcgaaggatccgattgaaaagaaaatgctggactatcgtcaacgcgcaatcaaaattctggctaatagctattacggctattacggttatgcgaaggcccgctggtactgcaaagaatgtgcggaatctgtcacggcctggggccgtgaatatatcgaatttgtgcgcaaagaactggaagaaaagttcggtttcaaggttctgtacattgatacggacggcctgtacgcaaccatcccgggtgctaaaccggaagaaattaagcgtaaggccctggaatttgtggaatacatcaacgcaaaactgccgggcctgctggaactggaatatgaaggcttctacgttcgcggctttttcgtcacgaagaaaaagtatgcgctgattgacgaagaaggcaaaatcattacccgtggtctggaaatcgttcgtcgcgattggagtgaaattgccaaagaaacccaggcacgcgtcctggaagcaatcctgaaagatggtgacgtggaagaagccgtccgtattgtgaaagaagttacggaaaaactgtccaaatatgaagttccgccggaaaaactggtcatccatgaacaaattacccgcgaactgaaagattacaaagcgacgggcccgcacgtcgcaatcgctaaacgtctggcggcgcgtggcgtgaaaattcgtccgggtaccgtgatctcatatattgttctgaaaggctcgggtcgtatcggtgaccgcgctattccgtttgatgaattcgacccgaaaaaacacaaatacgatgcggaatactacatcgaaaaccaggttctgccggccgtcgaacgtattctgcgcgcatttggctaccgtaaagaagatctgcgttatcaaaaaaccaaacaagtgggtctgggtgcgtggctgaaaccgaaaggtaaaaaataa

SEQ ID NO: 322 - DNA, 2328 bp, Artificial Sequence
  Synthetic
atgattctggatgctgattacattacggaagatggcaagccgattattcgcctgttcaaaaaggaaaacggtcgcttcaaggtggaatacgatcgtaactttcgcccgtatatttacgctctgctgaaagatgacagcgcgatcgatgacgtgcgtaaaattacctctgaacgccacggcaaggtggttcgtgtcatcgatgtggaaaaggttaaaaagaaattcctgggtcgcccgatcgaagtgtggaaactgtatttcgaacatccgcaggatgttccggctatgcgtgacaaaattcgcgaacacccggcggttatcgatatttttgaatatgacatcccgttcgctaaacgttacctgatcgataagggcctgattccgatggagggtaacgaagaactgacctttctggcggtggacattgaaacgctgtaccatgaaggcgaagaattcggcaaaggtccgattatcatgatcagctatgcagatgaagaaggtgctaaagtcatcacctggaagaaaattgacctgccgtatgtggaagtcgtggccaatgaacgtgaaatgattaagcgcctgatcaaagttattcgcgaaaaagatccggacgtcattatcacgtataacggcgataattttgacttcccgtacctgctgaagcgtgccgaaaaactgggcatgaagctgccgctgggtcgcgataacagtgaaccgaaaatgcagcgtctgggcgactccctggcagttgaaatcaaaggtcgcattcattttgacctgtttccggtgatccgtcgcaccattaatctgccgacctatacgctggaagcggtttacgaagccatcttcggcaagcaaaaggaaaaggtctacccgcacgaaatcgcagaagcttgggaaaccggcaaaggtctggaacgtgtcgccaagtatagtatggaagatgcaaaagtgacgtacgaactgggcaaggaatttttcccgatggaagcacagctggctcgcctggtgggccaaccgctgtgggacgtttcccgtagctctaccggtaatctggtggaatggtatctgctgcgtaaagcgtatgaacgcaacgaactggcaccgaataaaccggatgaacgtgaatatgaacgtcgcctgcgcgaatcttatgccggcggttacgttaaggaaccggaaaaaggcctgtgggaaggtctggtgtctctggattttcgctcactgtacccgtcgattatcattacgcataacgtgtccccggacaccctgaatcgtgaaggctgcatggaatatgatgttgctccggaagtcaaacacaagttttgtaaagactttccgggtttcattccgtcactgctgaaacgtctgctggatgaacgccaggaaatcaaacgtcgcatgaaagcctcgaaggatccgattgaaaagaaaatgctggactatcgtcaacgcgcaatcaaaattctggctaatagctattacggctattacggttatgcgaaggcccgctggtactgcaaagaatgtgcggaatctgtcacggcctggggccgtgaatatatcgaatttgtgcgcaaagaactggaagaaaagttcggtttcaaggttctgtacattgatacggacggcctgtacgcaaccatcccgggtgctaaaccggaagaaattaagcgtaaggccctggaatttgtggaatacatcaacgcaaaactgccgggcctgctggaactggaatatgaaggcttctacgttcgcggctttttcgtcacgaagaaaaagtatgcgctgattgacgaagaaggcaaaatcattacccgtggtctggaaatcgttcgtcgcgattggagtgaaattgccaaagaaacccaggcacgtgttctggaagcaattctgaaacatggtaacgtcgaagaagcggtcaaaatcgtgaaagaagttacggaaaaactgtctaactacgaaattccgccggaaaaactggccatctacgaacaaattacccgcccgctgcatgaatataaagcaatcggtccgcacgtcgcagtggcaaaacgtctggcagcacgcggcgttaaagtcaaaccgggtatggtcatcggctatattgtgctgcgtggtgatggcccgatcagcaaccgcgcaattctggctgaagaatacgatctgaaaaaacacaaatacgacgccgaatattacatcgaaaatcaggttctgccggctgtcctgcgtattctggaagcgtttggctatcgtaaagaagatctgcgctggcagaaaacccgtcaaacgggtctgacctcatggctgaatattaaaaaatcgtaa

SEQ ID NO: 323 - DNA, 2328 bp, Artificial Sequence
  Synthetic
atgattctggatgctgattacattacggaagatggcaagccgattattcgcctgttcaaaaaggaaaacggtcgcttcaaggtggaatacgatcgtaactttcgcccgtatatttacgctctgctgaaagatgacagcgcgatcgatgacgtgcgtaaaattacctctgaacgccacggcaaggtggttcgtgtcatcgatgtggaaaaggttaaaaagaaattcctgggtcgcccgatcgaagtgtggaaactgtatttcgaacatccgcaggatgttccggctatgcgtgacaaaattcgcgaacacccggcggttatcgatatttttgaatatgacatcccgttcgctaaacgttacctgatcgataagggcctgattccgatggagggtaacgaagaactgacctttctggcggtggacattgaaacgctgtaccatgaaggcgaagaattcggcaaaggtccgattatcatgatcagctatgcagatgaagaaggtgctaaagtcatcacctggaagaaaattgacctgccgtatgtggaagtcgtggccaatgaacgtgaaatgattaagcgcctgatcaaagttattcgcgaaaaagatccggacgtcattatcacgtataacggcgataattttgacttcccgtacctgctgaagcgtgccgaaaaactgggcatgaagctgccgctgggtcgcgataacagtgaaccgaaaatgcagcgtctgggcgactccctggcagttgaaatcaaaggtcgcattcattttgacctgtttccggtgatccgtcgcaccattaatctgccgacctatacgctggaagcggtttacgaagccatcttcggcaagcaaaaggaaaaggtctacccgcacgaaatcgcagaagcttgggaaaccggcaaaggtctggaacgtgtcgccaagtatagtatggaagatgcaaaagtgacgtacgaactgggcaaggaatttttcccgatggaagcacagctggctcgcctggtgggccaaccgctgtgggacgtttcccgtagctctaccggtaatctggtggaatggtatctgctgcgtaaagcgtatgaacgcaacgaactggcaccgaataaaccggatgaacgtgaatatgaacgtcgcctgcgcgaatcttatgccggcggttacgttaaggaaccggaaaaaggcctgtgggaaggtctggtgtctctggattttcgctcactgtacccgtcgattatcattacgcataacgtgtccccggacaccctgaatcgtgaaggctgcatggaatatgatgttgctccggaagtcaaacacaagttttgtaaagactttccgggtttcattccgtcactgctgaaacgtctgctggatgaacgccaggaaatcaaacgtcgcatgaaagcctcgaaggatccgattgaaaagaaaatgctggactatcgtcaacgcgcaatcaaaattctggctaatagctattacggctattacggttatgcgaaggcccgctggtactgcaaagaatgtgcggaatctgtcacggcctggggccgtgaatatatcgaatttgtgcgcaaagaactggaagaaaagttcggtttcaaggttctgtacattgatacggacggcctgtacgcaaccatcccgggtgctaaaccggaagaaattaagcgtaaggccctggaatttgtggaatacatcaacgcaaaactgccgggcctgctggaactggaatatgaaggcttctacgttcgcggctttttcgtcacgaagaaaaagtatgcgctgattgacgaagaaggcaaaatcattacccgtggtctggaaatcgttcgtcgcgattggagtgaaattgccaaagaaacccaggcaaaagttctggaagcaatcctgaaacatggtaatgtcgaagaagcagtgaaaattgtcaaggaagtgacggaaaaactgtcgaagtatgaaatcccgccggaaaaactggtgatctacgaacaaattacccgcccgctgcatgaatataaagcgattggcccgcacgtggcagttgctaaacgtctggcagcccgcggtgtcaaagtgcgtccgggcatggtgatcggttatattgttctgcgtggcgatggtccgatcagtaaacgcgcgattctggccgaagaatttgatccgcgcaaacacaagtacgacgccgaatattacatcgaaaaccaggtgctgccggctgttctgcgtattctggaagcgttcggctatcgtaaagaagatctgcgctggcagaaaaccaagcaaacgggtctgaccgcatggctgaatgtgaaaaagaaataa

SEQ ID NO: 324 - DNA, 2331 bp, Artificial Sequence
  Synthetic
atgattctggatgctgattacattacggaagatggcaagccgattattcgcctgttcaaaaaggaaaacggtcgcttcaaggtggaatacgatcgtaactttcgcccgtatatttacgctctgctgaaagatgacagcgcgatcgatgacgtgcgtaaaattacctctgaacgccacggcaaggtggttcgtgtcatcgatgtggaaaaggttaaaaagaaattcctgggtcgcccgatcgaagtgtggaaactgtatttcgaacatccgcaggatgttccggctatgcgtgacaaaattcgcgaacacccggcggttatcgatatttttgaatatgacatcccgttcgctaaacgttacctgatcgataagggcctgattccgatggagggtaacgaagaactgacctttctggcggtggacattgaaacgctgtaccatgaaggcgaagaattcggcaaaggtccgattatcatgatcagctatgcagatgaagaaggtgctaaagtcatcacctggaagaaaattgacctgccgtatgtggaagtcgtggccaatgaacgtgaaatgattaagcgcctgatcaaagttattcgcgaaaaagatccggacgtcattatcacgtataacggcgataattttgacttcccgtacctgctgaagcgtgccgaaaaactgggcatgaagctgccgctgggtcgcgataacagtgaaccgaaaatgcagcgtctgggcgactccctggcagttgaaatcaaaggtcgcattcattttgacctgtttccggtgatccgtcgcaccattaatctgccgacctatacgctggaagcggtttacgaagccatcttcggcaagcaaaaggaaaaggtctacccgcacgaaatcgcagaagcttgggaaaccggcaaaggtctggaacgtgtcgccaagtatagtatggaagatgcaaaagtgacgtacgaactgggcaaggaatttttcccgatggaagcacagctggctcgcctggtgggccaaccgctgtgggacgtttcccgtagctctaccggtaatctggtggaatggtatctgctgcgtaaagcgtatgaacgcaacgaagtggcaccgaataaaccggatgaacgtgaatatcagcgtcgcctgcgcgaaagttatgcaggcggttacgtgaaagaaccggaaaaaggtctgtgggaaggcctggtttatctggattttcgtgcgctgtacccgagcattatcattacgcataacgtttctccggacaccctgaatcgtgaaggctgccgcgaatatgatattgcgccggaagtgggtcacaaattttgtaaagatatcccgggcttcattccgagcctgctgaaacgtctgctggaagaacgccagaaaatcaaaacgaaaatgaaagaaacccaagatccgatcgaaaaaattctgctggactaccgtcagcgcgcgatcaaaattctggccaacagttattacggttattacggctatgcaaaagctcgctggtactgcaaagaatgtgcagaatccgttaccgcttggggtcgtaaatacatcgaattcgtctggaaagaactggaagaaaaattcggtttcaaagttctgtacatcgatacggacggtctgtacgcaaccatcccgggcggtaaaccggaagaaattaagaaaaaagccctggaatttgtggattacattaatgcaaaactgccgggcctgctggaactggaatatgaaggtttctacgtgcgtggctttttcgttaccaagaaaaaatatgccgtcattgacgaagaaggtaaagtgatcacccgcggcctggaaattgttcgtcgcgattggagtgaaattgccaaagaaacccaggcacgcgttctggaagcaatcctgcgtcatggtgacgtcgaagaagccgttcgcattgtcaaagatgtgacggaaaagctgtcgaaatatgaagtcccgccggaaaaactggtgatccatgaacaaattacccgtgaactgaaggattacaaagcgacgggcccgcacgttgcaattgctaaacgcctggcagcccgtggcatcaagattcgtccgggtaccgttatcagctatattgtcctgaaaggctctggtcgcatcggtgatcgtgctattccgtttgatgaattcgacccgacgaaacaccgttacgatgccgaatattacatcgaaaatcaggtgctgccggccgttgaacgcattctgaaagcatttggctataagaaagaagaactgcgctaccagaaaacccgtcaagtgggcctgggtgcgtggctgaagctgaaaggtaagaaataa

SEQ ID NO: 325 - DNA, 2325 bp, Artificial Sequence
  Synthetic
atgattctggatgctgattacattacggaagatggcaagccgattattcgcctgttcaaaaaggaaaacggtcgcttcaaggtggaatacgatcgtaactttcgcccgtatatttacgctctgctgaaagatgacagcgcgatcgatgacgtgcgtaaaattacctctgaacgccacggcaaggtggttcgtgtcatcgatgtggaaaaggttaaaaagaaattcctgggtcgcccgatcgaagtgtggaaactgtatttcgaacatccgcaggatgttccggctatgcgtgacaaaattcgcgaacacccggcggttatcgatatttttgaatatgacatcccgttcgctaaacgttacctgatcgataagggcctgattccgatggagggtaacgaagaactgacctttctggcggtggacattgaaacgctgtaccatgaaggcgaagaattcggcaaaggtccgattatcatgatcagctatgcagatgaagaaggtgctaaagtcatcacctggaagaaaattgacctgccgtatgtggaagtcgtggccaatgaacgtgaaatgattaagcgcctgatcaaagttattcgcgaaaaagatccggacgtcattatcacgtataacggcgataattttgacttcccgtacctgctgaagcgtgccgaaaaactgggcatgaagctgccgctgggtcgcgataacagtgaaccgaaaatgcagcgtctgggcgactccctggcagttgaaatcaaaggtcgcattcattttgacctgtttccggtgatccgtcgcaccattaatctgccgacctatacgctggaagcggtttacgaagccatcttcggcaagcaaaaggaaaaggtctacccgcacgaaatcgcagaagcttgggaaaccggcaaaggtctggaacgtgtcgccaagtatagtatggaagatgcaaaagtgacgtacgaactgggcaaggaatttttcccgatggaagcacagctggctcgcctggtgggccaaccgctgtgggacgtttcccgtagctctaccggtaatctggtggaatggtatctgctgcgtaaagcgtatgaacgcaacgaagtggcaccgaataaaccggatgaacgtgaatatcagcgtcgcctgcgcgaaagttatgcaggcggttacgtgaaagaaccggaaaaaggtctgtgggaaggcctggtttatctggattttcgtgcgctgtacccgagcattatcattacgcataacgtttctccggacaccctgaatcgtgaaggctgccgcgaatatgatattgcgccggaagtgggtcacaaattttgtaaagatatcccgggcttcattccgagcctgctgaaacgtctgctggaagaacgccagaaaatcaaaacgaaaatgaaagaaacccaagatccgatcgaaaaaattctgctggactaccgtcagcgcgcgatcaaaattctggccaacagttattacggttattacggctatgcaaaagctcgctggtactgcaaagaatgtgcagaatccgttaccgcttggggtcgtaaatacatcgaattcgtctggaaagaactggaagaaaaattcggtttcaaagttctgtacatcgatacggacggtctgtacgcaaccatcccgggcggtaaaccggaagaaattaagaaaaaagccctggaatttgtggattacattaatgcaaaactgccgggcctgctggaactggaatatgaaggtttctacgtgcgtggctttttcgttaccaagaaaaaatatgccgtcattgacgaagaaggtaaagtgatcacccgcggcctggaaattgttcgtcgcgattggagtgaaattgccaaagaaacccaggcacgtgtcctggaagcaatcctgaaacatggtgatgtggaagaagcggttcgcattgtcaaagaagtgacggaaaagctgtcgaaatatgaagttccgccggaaaaactggtcatccatgaacaaattacccgcgatctgcgtgactacaaagccacgggtccgcacgtggcagttgcaaaacgtctggcagcccgtggcgtgaagattcgtccgggtaccgtgatcagttatattgttctgaaaggctccggtcgcatcggtgaccgtgctattccgtttgatgaattcgacccgacgaaacaccgttacgatgccgaatattacatcgaaaatcaggtcctgccggccgtggaacgcattctgaaagcatttggttatcgcaaggaagatctgcgttaccagaagaccaaacaagtcggcctgggtgcgtggctgaaagtgaaaaagtaa

SEQ ID NO: 326 - DNA, 2331 bp, Artificial Sequence
  Synthetic
atgattctggatgctgattacattacggaagatggcaagccgattattcgcctgttcaaaaaggaaaacggtcgcttcaaggtggaatacgatcgtaactttcgcccgtatatttacgctctgctgaaagatgacagcgcgatcgatgacgtgcgtaaaattacctctgaacgccacggcaaggtggttcgtgtcatcgatgtggaaaaggttaaaaagaaattcctgggtcgcccgatcgaagtgtggaaactgtatttcgaacatccgcaggatgttccggctatgcgtgacaaaattcgcgaacacccggcggttatcgatatttttgaatatgacatcccgttcgctaaacgttacctgatcgataagggcctgattccgatggagggtaacgaagaactgacctttctggcggtggacattgaaacgctgtaccatgaaggcgaagaattcggcaaaggtccgattatcatgatcagctatgcagatgaagaaggtgctaaagtcatcacctggaagaaaattgacctgccgtatgtggaagtcgtggccaatgaacgtgaaatgattaagcgcctgatcaaagttattcgcgaaaaagatccggacgtcattatcacgtataacggcgataattttgacttcccgtacctgctgaagcgtgccgaaaaactgggcatgaagctgccgctgggtcgcgataacagtgaaccgaaaatgcagcgtctgggcgactccctggcagttgaaatcaaaggtcgcattcattttgacctgtttccggtgatccgtcgcaccattaatctgccgacctatacgctggaagcggtttacgaagccatcttcggcaagcaaaaggaaaaggtctacccgcacgaaatcgcagaagcttgggaaaccggcaaaggtctggaacgtgtcgccaagtatagtatggaagatgcaaaagtgacgtacgaactgggcaaggaatttttcccgatggaagcacagctggctcgcctggtgggccaaccgctgtgggacgtttcccgtagctctaccggtaatctggtggaatggtatctgctgcgtaaagcgtatgaacgcaacgaagtggcaccgaataaaccggatgaacgtgaatatcagcgtcgcctgcgcgaaagttatgcaggcggttacgtgaaagaaccggaaaaaggtctgtgggaaggcctggtttatctggattttcgtgcgctgtacccgagcattatcattacgcataacgtttctccggacaccctgaatcgtgaaggctgccgcgaatatgatattgcgccggaagtgggtcacaaattttgtaaagatatcccgggcttcattccgagcctgctgaaacgtctgctggaagaacgccagaaaatcaaaacgaaaatgaaagaaacccaagatccgatcgaaaaaattctgctggactaccgtcagcgcgcgatcaaaattctggccaacagttattacggttattacggctatgcaaaagctcgctggtactgcaaagaatgtgcagaatccgttaccgcttggggtcgtaaatacatcgaattcgtctggaaagaactggaagaaaaattcggtttcaaagttctgtacatcgatacggacggtctgtacgcaaccatcccgggcggtaaaccggaagaaattaagaaaaaagccctggaatttgtggattacattaatgcaaaactgccgggcctgctggaactggaatatgaaggtttctacgtgcgtggctttttcgttaccaagaaaaaatatgccgtcattgacgaagaaggtaaagtgatcacccgcggcctggaaattgttcgtcgcgattggagtgaaattgccaaagaaacccaggcacgtgtgctggaagctctgctgaaagatggcaatgttgaagaagcggtttccattgtcaaagaagtgacggaaaagctgggtaaatatgaagtcccgccggaaaaactggtgatccatgaacaaattacccgcgaactgaaggattacaaagcgacgggcccgcacgttgctatcgcgaaacgtctggcagcgcgtggcgtgaagattcgtccgggtaccgttatcagctatattgtcctgaaaggctctggtcgtatcggtgaccgcgcgattccgtttgatgaattcgacccgacgaaacatcgctacgatgcagaatattacatcgaaaaccaggttctgccggctgtcgaacgtattctgaaagcgtttggctatcgtgccgaagatctgcgctaccagaaaacccgtcaagtgggcctgggtgtttggctgcaaccgaaaggtaagaaataa

SEQ ID NO: 327 - DNA, 2328 bp, Artificial Sequence
  Synthetic
atgattctggatgctgattacattacggaagatggcaagccgattattcgcctgttcaaaaaggaaaacggtcgcttcaaggtggaatacgatcgtaactttcgcccgtatatttacgctctgctgaaagatgacagcgcgatcgatgacgtgcgtaaaattacctctgaacgccacggcaaggtggttcgtgtcatcgatgtggaaaaggttaaaaagaaattcctgggtcgcccgatcgaagtgtggaaactgtatttcgaacatccgcaggatgttccggctatgcgtgacaaaattcgcgaacacccggcggttatcgatatttttgaatatgacatcccgttcgctaaacgttacctgatcgataagggcctgattccgatggagggtaacgaagaactgacctttctggcggtggacattgaaacgctgtaccatgaaggcgaagaattcggcaaaggtccgattatcatgatcagctatgcagatgaagaaggtgctaaagtcatcacctggaagaaaattgacctgccgtatgtggaagtcgtggccaatgaacgtgaaatgattaagcgcctgatcaaagttattcgcgaaaaagatccggacgtcattatcacgtataacggcgataattttgacttcccgtacctgctgaagcgtgccgaaaaactgggcatgaagctgccgctgggtcgcgataacagtgaaccgaaaatgcagcgtctgggcgactccctggcagttgaaatcaaaggtcgcattcattttgacctgtttccggtgatccgtcgcaccattaatctgccgacctatacgctggaagcggtttacgaagccatcttcggcaagcaaaaggaaaaggtctacccgcacgaaatcgcagaagcttgggaaaccggcaaaggtctggaacgtgtcgccaagtatagtatggaagatgcaaaagtgacgtacgaactgggcaaggaatttttcccgatggaagcacagctggctcgcctggtgggccaaccgctgtgggacgtttcccgtagctctaccggtaatctggtggaatggtatctgctgcgtaaagcgtatgaacgcaacgaagtggcaccgaataaaccggatgaacgtgaatatcagcgtcgcctgcgcgaaagttatgcaggcggttacgtgaaagaaccggaaaaaggtctgtgggaaggcctggtttatctggattttcgtgcgctgtacccgagcattatcattacgcataacgtttctccggacaccctgaatcgtgaaggctgccgcgaatatgatattgcgccggaagtgggtcacaaattttgtaaagatatcccgggcttcattccgagcctgctgaaacgtctgctggaagaacgccagaaaatcaaaacgaaaatgaaagaaacccaagatccgatcgaaaaaattctgctggactaccgtcagcgcgcgatcaaaattctggccaacagttattacggttattacggctatgcaaaagctcgctggtactgcaaagaatgtgcagaatccgttaccgcttggggtcgtaaatacatcgaattcgtctggaaagaactggaagaaaaattcggtttcaaagttctgtacatcgatacggacggtctgtacgcaaccatcccgggcggtaaaccggaagaaattaagaaaaaagccctggaatttgtggattacattaatgcaaaactgccgggcctgctggaactggaatatgaaggtttctacgtgcgtggctttttcgttaccaagaaaaaatatgccgtcattgacgaagaaggtaaagtgatcacccgcggcctggaaattgttcgtcgcgattggagtgaaattgccaaagaaacccaggcaaaggttctggaagcaattctgaaacatggtaacgtcgaagaagcggtcaagatcgtgaaagaagttaccgaaaaactgtcgaattatgaaattccggtcgaaaagctggtgatctacgaacaaattacgcgcccgctgaacgaatataaagccattggcccgcacgtggcagttgctaaacgtctggcggccaagggtatcaagattaaaccgggcatggtgattggttatgttgtcctgcgcggcgatggtccgatcagcaaacgtgcgatcgccatcgaagaattcgatggcaaaaagcataagtacgacgcagaatactacatcgaaaatcaggttctgccggccgtcgaacgtatcctgaaagcattcggttataagcgtgaagatctgcgctggcagaagaccaaacaagtgggcctgggtgcgtggctgaaagttaaaaagtcttaa

SEQ ID NO: 328 - DNA, 2331 bp, Artificial Sequence
  Synthetic
atgattctggatgctgattacattacggaagatggcaagccgattattcgcctgttcaaaaaggaaaacggtcgcttcaaggtggaatacgatcgtaactttcgcccgtatatttacgctctgctgaaagatgacagcgcgatcgatgacgtgcgtaaaattacctctgaacgccacggcaaggtggttcgtgtcatcgatgtggaaaaggttaaaaagaaattcctgggtcgcccgatcgaagtgtggaaactgtatttcgaacatccgcaggatgttccggctatgcgtgacaaaattcgcgaacacccggcggttatcgatatttttgaatatgacatcccgttcgctaaacgttacctgatcgataagggcctgattccgatggagggtaacgaagaactgacctttctggcggtggacattgaaacgctgtaccatgaaggcgaagaattcggcaaaggtccgattatcatgatcagctatgcagatgaagaaggtgctaaagtcatcacctggaagaaaattgacctgccgtatgtggaagtcgtggccaatgaacgtgaaatgattaagcgcctgatcaaagttattcgcgaaaaagatccggacgtcattatcacgtataacggcgataattttgacttcccgtacctgctgaagcgtgccgaaaaactgggcatgaagctgccgctgggtcgcgataacagtgaaccgaaaatgcagcgtctgggcgactccctggcagttgaaatcaaaggtcgcattcattttgacctgtttccggtgatccgtcgcaccattaatctgccgacctatacgctggaagcggtttacgaagccatcttcggcaagcaaaaggaaaaggtctacccgcacgaaatcgcagaagcttgggaaaccggcaaaggtctggaacgtgtcgccaagtatagtatggaagatgcaaaagtgacgtacgaactgggcaaggaatttttcccgatggaagcacagctggctcgcctggtgggccaaccgctgtgggacgtttcccgtagctctaccggtaatctggtggaatggtatctgctgcgtaaagcgtatgaacgcaacgaagtggcaccgaataaaccggatgaacgtgaatatcagcgtcgcctgcgcgaaagttatgcaggcggttacgtgaaagaaccggaaaaaggtctgtgggaaggcctggtttatctggattttcgtgcgctgtacccgagcattatcattacgcataacgtttctccggacaccctgaatcgtgaaggctgccgcgaatatgatattgcgccggaagtgggtcacaaattttgtaaagatatcccgggcttcattccgagcctgctgaaacgtctgctggaagaacgccagaaaatcaaaacgaaaatgaaagaaacccaagatccgatcgaaaaaattctgctggactaccgtcagcgcgcgatcaaaattctggccaacagttattacggttattacggctatgcaaaagctcgctggtactgcaaagaatgtgcagaatccgttaccgcttggggtcgtaaatacatcgaattcgtctggaaagaactggaagaaaaattcggtttcaaagttctgtacatcgatacggacggtctgtacgcaaccatcccgggcggtaaaccggaagaaattaagaaaaaagccctggaatttgtggattacattaatgcaaaactgccgggcctgctggaactggaatatgaaggtttctacgtgcgtggctttttcgttaccaagaaaaaatatgccgtcattgacgaagaaggtaaagtgatcacccgcggcctggaaattgttcgtcgcgattggagtgaaattgccaaagaaacccaggcacgtgttctggaagcactgctgaaagatggtaatgtcgaagaagcagtgagtattgttaaagaagtcacggaaaaactgtccaagtatgaagtcccgccggaaaaactggtgattcatgaacaaatcacccgcgaactgaaagattacaaggcgacgggcccgcacgtggcaattgctaaacgtctggcagcgcgtggcgttaagatccgtccgggtaccgttattagctatatcgtcctgaaaggctctggtcgtattggtgaccgcgccatcccgtttgatgaattcgacccggctaaacaccgctacgatgcggaatattacattgaaaatcaggtcctgccggctgtggaacgtatcctgaaagcgtttggctatcgtaaggaagatctgcgctaccagaaaacccgtcaagtgggcctgggtgcgtggctgaaaccgaagggtaaaaagtaa

SEQ ID NO: 329 - DNA, 2331 bp, Artificial Sequence
  Synthetic
atgattctggatgctgattacattacggaagatggcaagccgattattcgcctgttcaaaaaggaaaacggtcgcttcaaggtggaatacgatcgtaactttcgcccgtatatttacgctctgctgaaagatgacagcgcgatcgatgacgtgcgtaaaattacctctgaacgccacggcaaggtggttcgtgtcatcgatgtggaaaaggttaaaaagaaattcctgggtcgcccgatcgaagtgtggaaactgtatttcgaacatccgcaggatgttccggctatgcgtgacaaaattcgcgaacacccggcggttatcgatatttttgaatatgacatcccgttcgctaaacgttacctgatcgataagggcctgattccgatggagggtaacgaagaactgacctttctggcggtggacattgaaacgctgtaccatgaaggcgaagaattcggcaaaggtccgattatcatgatcagctatgcagatgaagaaggtgctaaagtcatcacctggaagaaaattgacctgccgtatgtggaagtcgtggccaatgaacgtgaaatgattaagcgcctgatcaaagttattcgcgaaaaagatccggacgtcattatcacgtataacggcgataattttgacttcccgtacctgctgaagcgtgccgaaaaactgggcatgaagctgccgctgggtcgcgataacagtgaaccgaaaatgcagcgtctgggcgactccctggcagttgaaatcaaaggtcgcattcattttgacctgtttccggtgatccgtcgcaccattaatctgccgacctatacgctggaagcggtttacgaagccatcttcggcaagcaaaaggaaaaggtctacccgcacgaaatcgcagaagcttgggaaaccggcaaaggtctggaacgtgtcgccaagtatagtatggaagatgcaaaagtgacgtacgaactgggcaaggaatttttcccgatggaagcacagctggctcgcctggtgggccaaccgctgtgggacgtttcccgtagctctaccggtaatctggtggaatggtatctgctgcgtaaagcgtatgaacgcaacgaagtggcaccgaataaaccggatgaacgtgaatatcagcgtcgcctgcgcgaaagttatgcaggcggttacgtgaaagaaccggaaaaaggtctgtgggaaggcctggtttatctggattttcgtgcgctgtacccgagcattatcattacgcataacgtttctccggacaccctgaatcgtgaaggctgccgcgaatatgatattgcgccggaagtgggtcacaaattttgtaaagatatcccgggcttcattccgagcctgctgaaacgtctgctggaagaacgccagaaaatcaaaacgaaaatgaaagaaacccaagatccgatcgaaaaaattctgctggactaccgtcagcgcgcgatcaaaattctggccaacagttattacggttattacggctatgcaaaagctcgctggtactgcaaagaatgtgcagaatccgttaccgcttggggtcgtaaatacatcgaattcgtctggaaagaactggaagaaaaattcggtttcaaagttctgtacatcgatacggacggtctgtacgcaaccatcccgggcggtaaaccggaagaaattaagaaaaaagccctggaatttgtggattacattaatgcaaaactgccgggcctgctggaactggaatatgaaggtttctacgtgcgtggctttttcgttaccaagaaaaaatatgccgtcattgacgaagaaggtaaagtgatcacccgcggcctggaaattgttcgtcgcgattggagtgaaattgccaaagaaacccaggcacgcgtcctggaagcaatcctgaaagatggtgacgtggaagaagccgtccgtattgtgaaagaagttacggaaaaactgtccaaatatgaagttccgccggaaaaactggtcatccatgaacaaattacccgcgaactgaaagattacaaagcgacgggcccgcacgtcgcaatcgctaaacgtctggcggcgcgtggcgtgaaaattcgtccgggtaccgtgatctcatatattgttctgaaaggctcgggtcgtatcggtgaccgcgctattccgtttgatgaattcgacccgaaaaaacacaaatacgatgcggaatactacatcgaaaaccaggttctgccggccgtcgaacgtattctgcgcgcatttggctaccgtaaagaagatctgcgttatcaaaaaaccaaacaagtgggtctgggtgcgtggctgaaaccgaaaggtaaaaaataa

SEQ ID NO: 330 - DNA, 2328 bp, Artificial Sequence
  Synthetic
atgattctggatgctgattacattacggaagatggcaagccgattattcgcctgttcaaaaaggaaaacggtcgcttcaaggtggaatacgatcgtaactttcgcccgtatatttacgctctgctgaaagatgacagcgcgatcgatgacgtgcgtaaaattacctctgaacgccacggcaaggtggttcgtgtcatcgatgtggaaaaggttaaaaagaaattcctgggtcgcccgatcgaagtgtggaaactgtatttcgaacatccgcaggatgttccggctatgcgtgacaaaattcgcgaacacccggcggttatcgatatttttgaatatgacatcccgttcgctaaacgttacctgatcgataagggcctgattccgatggagggtaacgaagaactgacctttctggcggtggacattgaaacgctgtaccatgaaggcgaagaattcggcaaaggtccgattatcatgatcagctatgcagatgaagaaggtgctaaagtcatcacctggaagaaaattgacctgccgtatgtggaagtcgtggccaatgaacgtgaaatgattaagcgcctgatcaaagttattcgcgaaaaagatccggacgtcattatcacgtataacggcgataattttgacttcccgtacctgctgaagcgtgccgaaaaactgggcatgaagctgccgctgggtcgcgataacagtgaaccgaaaatgcagcgtctgggcgactccctggcagttgaaatcaaaggtcgcattcattttgacctgtttccggtgatccgtcgcaccattaatctgccgacctatacgctggaagcggtttacgaagccatcttcggcaagcaaaaggaaaaggtctacccgcacgaaatcgcagaagcttgggaaaccggcaaaggtctggaacgtgtcgccaagtatagtatggaagatgcaaaagtgacgtacgaactgggcaaggaatttttcccgatggaagcacagctggctcgcctggtgggccaaccgctgtgggacgtttcccgtagctctaccggtaatctggtggaatggtatctgctgcgtaaagcgtatgaacgcaacgaagtggcaccgaataaaccggatgaacgtgaatatcagcgtcgcctgcgcgaaagttatgcaggcggttacgtgaaagaaccggaaaaaggtctgtgggaaggcctggtttatctggattttcgtgcgctgtacccgagcattatcattacgcataacgtttctccggacaccctgaatcgtgaaggctgccgcgaatatgatattgcgccggaagtgggtcacaaattttgtaaagatatcccgggcttcattccgagcctgctgaaacgtctgctggaagaacgccagaaaatcaaaacgaaaatgaaagaaacccaagatccgatcgaaaaaattctgctggactaccgtcagcgcgcgatcaaaattctggccaacagttattacggttattacggctatgcaaaagctcgctggtactgcaaagaatgtgcagaatccgttaccgcttggggtcgtaaatacatcgaattcgtctggaaagaactggaagaaaaattcggtttcaaagttctgtacatcgatacggacggtctgtacgcaaccatcccgggcggtaaaccggaagaaattaagaaaaaagccctggaatttgtggattacattaatgcaaaactgccgggcctgctggaactggaatatgaaggtttctacgtgcgtggctttttcgttaccaagaaaaaatatgccgtcattgacgaagaaggtaaagtgatcacccgcggcctggaaattgttcgtcgcgattggagtgaaattgccaaagaaacccaggcacgtgttctggaagcaattctgaaacatggtaacgtcgaagaagcggtcaaaatcgtgaaagaagttacggaaaaactgtctaactacgaaattccgccggaaaaactggccatctacgaacaaattacccgcccgctgcatgaatataaagcaatcggtccgcacgtcgcagtggcaaaacgtctggcagcacgcggcgttaaagtcaaaccgggtatggtcatcggctatattgtgctgcgtggtgatggcccgatcagcaaccgcgcaattctggctgaagaatacgatctgaaaaaacacaaatacgacgccgaatattacatcgaaaatcaggttctgccggctgtcctgcgtattctggaagcgtttggctatcgtaaagaagatctgcgctggcagaaaacccgtcaaacgggtctgacctcatggctgaatattaaaaaatcgtaa

SEQ ID NO: 331 - DNA, 2538 bp, Artificial Sequence
  Synthetic
atgatcttagatgcagattatatcacggaagaaggcaaaccagtgattcgcctgtttaaaaaagaaaatggcgaatttaaaatcgaacatgatcgcacctttcgcccgtatatctatgccctgctgaaagatgatagtaaaatcgaagaagttaagaaaatcacagcggaacgtcatggtaaaattgttcgcatcgttgatgcggaaaaagttgaaaagaaatttctgggtcgtcctattacagtttggcgtctgtattttgaacatcctcaggatgttccgacgattcgcgaaaaaatccgcgaacatagcgccgttgtggacatatttgaatatgatattccgtttgccaaacgctatctgattgataaaggtttaatccctatggaaggcgatgaagaactgaaactgttagcgtttgacatcgaaaccctgtatcatgaaggtgaagaatttggcaaaggcccgatcatcatgatctcttatgcagatgaagaagaagctaaagtgatcacttggaagaagatcgatttaccgtatgttgaagttgtgtctagtgaacgcgaaatgatcaaacgctttctgaaaatcattcgcgaaaaagatccggatattatcattacctataatggtgatagctttgatttaccttatttagccaaacgtgccgaaaaactgggcatcaaactgacgatcggtcgtgatggtagcgaacctaaaatgcagcgcatcggcgatatgacagcagttgaagttaaaggtcgcatccattttgatctgtatcatgttattcgtcgtacaatcaatttaccgacctataccctggaagcagtgtatgaagccatctttggtaaacctaaagaaaaagtgtatgcggatgaaattgctaaagcttgggaaacgggcgaaggcttagaacgcgttgctaaatatagcatggaagatgccaaagctacctatgaactgggcaaagaatttttccctatggaagctcagctgagtcgtctggtgggtcagcctctgtgggatgtgagtcgtagtagtacgggcaatttagtggaatggtttctgctgcgcaaagcctatgaacgtaatgaattagcacctaacaaaccggatgaacgcgaatatgaacgccgcctgcgtgaatcttatgcaggcggttttgttaaagaaccggaaaaaggcctgtgggaaaatattgtgtctctggattttcgtgatctgtatccgagcatcatcattacacataatgtgtctccagataccctgaatcgcgaaggttgtcgtaattatgatgttgctccggaagtgggtcataaattttgcaaagattttccaggttttattccgagtctgctgaaacgcttactggatgaacgtcagaaaatcaaaaccaaaatgaaagcctcacaggatcctatcgaaaaaatcatgttagattatcgtcagcgtgccatcaaaattctggccaatagctattatggctattatggctatgctaaagctcgctggtattgcaaagaatgcgccgaatcagtgaccgcttggggtcgcgaatatatcgaatttgtgtggaaagaactggaagaaaaatttggctttaaagttctgtatatcgataccgatggcctgtatgcgaccattccgggtggtaaatctgaagaaattaagaagaaggccttagaatttgtggattatattaatgccaaactgccgggcctgctggaactggaatatgaaggcttttataaacgcggcttcttcgtgaccaagaaaaaatatgcactgatcgatgaagaaggtaaaatcattacacgcggcttagaaattgtgcgccgcgattggagcgaaattgccaaagaaacccaggcccgcgttctggaagccatcctgaaacatggtaatgtggaagaagcagttcgcattgttaaagaagtgacacagaaactgagcaaatatgaaatcccaccggaaaaactggccatctatgaacagattacacgtccactgcatgaatataaagccattggtccacatgttgcggttgccaaacgcttagccgctaaaggtgttaaaatcaaaccaggcatggttatcggctatattgttctgcgcggcgatggtccgatctctaatcgtgccatcttagcggaagaatatgatccacgcaaacataaatatgatgccgaatattatatcgaaaatcaggtgttaccagcagtgctgcgcattctggaaggctttggctatcgcaaagaagatttacgttggcagaaaaccaaacagacgggcctgacaagttggctgaatattaaaaaatcaggtacgggcggtggcggtgctacggttaaatttaaatataaaggcgaagaaaaagaagtggatattagtaaaatcaaaaaagtttggcgtgtgggcaaaatgatctctttcacttatgatgaaggcggcggcaaaaccggccgcggtgccgtgagcgaaaaagatgctcctaaagaactgttgcaaatgttagaaaaacagaaaaaaaattaa

SEQ ID NO: 332 - DNA, 2538 bp, Artificial Sequence
  Synthetic
atgatcttagatgcagattatatcacggaagaaggcaaaccagtgattcgcctgtttaaaaaagaaaatggcgaatttaaaatcgaacatgatcgcacctttcgcccgtatatctatgccctgctgaaagatgatagtaaaatcgaagaagttaagaaaatcacagcggaacgtcatggtaaaattgttcgcatcgttgatgcggaaaaagttgaaaagaaatttctgggtcgtcctattacagtttggcgtctgtattttgaacatcctcaggatgttccgacgattcgcgaaaaaatccgcgaacatagcgccgttgtggacatatttgaatatgatattccgtttgccaaacgctatctgattgataaaggtttaatccctatggaaggcgatgaagaactgaaactgttagcgtttgacatcgaaaccctgtatcatgaaggtgaagaatttggcaaaggcccgatcatcatgatctcttatgcagatgaagaagaagctaaagtgatcacttggaagaagatcgatttaccgtatgttgaagttgtgtctagtgaacgcgaaatgatcaaacgctttctgaaaatcattcgcgaaaaagatccggatattatcattacctataatggtgatagctttgatttaccttatttagccaaacgtgccgaaaaactgggcatcaaactgacgatcggtcgtgatggtagcgaacctaaaatgcagcgcatcggcgatatgacagcagttgaagttaaaggtcgcatccattttgatctgtatcatgttattcgtcgtacaatcaatttaccgacctataccctggaagcagtgtatgaagccatctttggtaaacctaaagaaaaagtgtatgcggatgaaattgctaaagcttgggaaacgggcgaaggcttagaacgcgttgctaaatatagcatggaagatgccaaagctacctatgaactgggcaaagaatttttccctatggaagctcagctgagtcgtctggtgggtcagcctctgtgggatgtgagtcgtagtagtacgggcaatttagtggaatggtttctgctgcgcaaagcctatgaacgtaatgaattagcacctaacaaaccggatgaacgcgaatatgaacgccgcctgcgtgaatcttatgcaggcggttttgttaaagaaccggaaaaaggcctgtgggaaaatattgtgtctctggattttcgttttctgtatccgagcatcatcattacacataatgtgtctccagataccctgaatcgcgaaggttgtcgtaattatgatgttgctccggaagtgggtcataaattttgcaaagattttccaggttttattccgagtctgctgaaacgcttactggatgaacgtcagaaaatcaaaaccaaaatgaaagcctcacaggatcctatcgaaaaaatcatgttagattatcgtcagcgtgccatcaaaattctggccaatagctattatggctattatggctatgctaaagctcgctggtattgcaaagaatgcgccgaatcagtgaccgcttggggtcgcgaatatatcgaatttgtgtggaaagaactggaagaaaaatttggctttaaagttctgtatatcgataccgatggcctgtatgcgaccattccgggtggtaaatctgaagaaattaagaagaaggccttagaatttgtggattatattaatgccaaactgccgggcctgctggaactggaatatgaaggcttttataaacgcggcttcttcgtgaccaagaaaaaatatgcactgatcgatgaagaaggtaaaatcattacacgcggcttagaaattgtgcgccgcgattggagcgaaattgccaaagaaacccaggcccgcgttctggaagccatcctgaaacatggtaatgtggaagaagcagttcgcattgttaaagaagtgacacagaaactgagcaaatatgaaatcccaccggaaaaactggccatctatgaacagattacacgtccactgcatgaatataaagccattggtccacatgttgcggttgccaaacgcttagccgctaaaggtgttaaaatcaaaccaggcatggttatcggctatattgttctgcgcggcgatggtccgatctctaatcgtgccatcttagcggaagaatatgatccacgcaaacataaatatgatgccgaatattatatcgaaaatcaggtgttaccagcagtgctgcgcattctggaaggctttggctatcgcaaagaagatttacgttggcagaaaaccaaacagacgggcctgacaagttggctgaatattaaaaaatcaggtacgggcggtggcggtgctacggttaaatttaaatataaaggcgaagaaaaagaagtggatattagtaaaatcaaaaaagtttggcgtgtgggcaaaatgatctctttcacttatgatgaaggcggcggcaaaaccggccgcggtgccgtgagcgaaaaagatgctcctaaagaactgttgcaaatgttagaaaaacagaaaaaaaattaa

SEQ ID NO: 333 - DNA, 2538 bp, Artificial Sequence
  Synthetic
atgatcttagatgcagattatatcacggaagaaggcaaaccagtgattcgcctgtttaaaaaagaaaatggcgaatttaaaatcgaacatgatcgcacctttcgcccgtatatctatgccctgctgaaagatgatagtaaaatcgaagaagttaagaaaatcacagcggaacgtcatggtaaaattgttcgcatcgttgatgcggaaaaagttgaaaagaaatttctgggtcgtcctattacagtttggcgtctgtattttgaacatcctcaggatgttccgacgattcgcgaaaaaatccgcgaacatagcgccgttgtggacatatttgaatatgatattccgtttgccaaacgctatctgattgataaaggtttaatccctatggaaggcgatgaagaactgaaactgttagcgtttgacatcgaaaccctgtatcatgaaggtgaagaatttggcaaaggcccgatcatcatgatctcttatgcagatgaagaagaagctaaagtgatcacttggaagaagatcgatttaccgtatgttgaagttgtgtctagtgaacgcgaaatgatcaaacgctttctgaaaatcattcgcgaaaaagatccggatattatcattacctataatggtgatagctttgatttaccttatttagccaaacgtgccgaaaaactgggcatcaaactgacgatcggtcgtgatggtagcgaacctaaaatgcagcgcatcggcgatatgacagcagttgaagttaaaggtcgcatccattttgatctgtatcatgttattcgtcgtacaatcaatttaccgacctataccctggaagcagtgtatgaagccatctttggtaaacctaaagaaaaagtgtatgcggatgaaattgctaaagcttgggaaacgggcgaaggcttagaacgcgttgctaaatatagcatggaagatgccaaagctacctatgaactgggcaaagaatttttccctatggaagctcagctgagtcgtctggtgggtcagcctctgtgggatgtgagtcgtagtagtacgggcaatttagtggaatggtttctgctgcgcaaagcctatgaacgtaatgaattagcacctaacaaaccggatgaacgcgaatatgaacgccgcctgcgtgaatcttatgcaggcggttttgttaaagaaccggaaaaaggcctgtgggaaaatattgtgtctctggattttcgtggcctgtatccgagcatcatcattacacataatgtgtctccagataccctgaatcgcgaaggttgtcgtaattatgatgttgctccggaagtgggtcataaattttgcaaagattttccaggttttattccgagtctgctgaaacgcttactggatgaacgtcagaaaatcaaaaccaaaatgaaagcctcacaggatcctatcgaaaaaatcatgttagattatcgtcagcgtgccatcaaaattctggccaatagctattatggctattatggctatgctaaagctcgctggtattgcaaagaatgcgccgaatcagtgaccgcttggggtcgcgaatatatcgaatttgtgtggaaagaactggaagaaaaatttggctttaaagttctgtatatcgataccgatggcctgtatgcgaccattccgggtggtaaatctgaagaaattaagaagaaggccttagaatttgtggattatattaatgccaaactgccgggcctgctggaactggaatatgaaggcttttataaacgcggcttcttcgtgaccaagaaaaaatatgcactgatcgatgaagaaggtaaaatcattacacgcggcttagaaattgtgcgccgcgattggagcgaaattgccaaagaaacccaggcccgcgttctggaagccatcctgaaacatggtaatgtggaagaagcagttcgcattgttaaagaagtgacacagaaactgagcaaatatgaaatcccaccggaaaaactggccatctatgaacagattacacgtccactgcatgaatataaagccattggtccacatgttgcggttgccaaacgcttagccgctaaaggtgttaaaatcaaaccaggcatggttatcggctatattgttctgcgcggcgatggtccgatctctaatcgtgccatcttagcggaagaatatgatccacgcaaacataaatatgatgccgaatattatatcgaaaatcaggtgttaccagcagtgctgcgcattctggaaggctttggctatcgcaaagaagatttacgttggcagaaaaccaaacagacgggcctgacaagttggctgaatattaaaaaatcaggtacgggcggtggcggtgctacggttaaatttaaatataaaggcgaagaaaaagaagtggatattagtaaaatcaaaaaagtttggcgtgtgggcaaaatgatctctttcacttatgatgaaggcggcggcaaaaccggccgcggtgccgtgagcgaaaaagatgctcctaaagaactgttgcaaatgttagaaaaacagaaaaaaaattaa

SEQ ID NO: 334 - DNA, 2538 bp, Artificial Sequence
  Synthetic
atgatcttagatgcagattatatcacggaagaaggcaaaccagtgattcgcctgtttaaaaaagaaaatggcgaatttaaaatcgaacatgatcgcacctttcgcccgtatatctatgccctgctgaaagatgatagtaaaatcgaagaagttaagaaaatcacagcggaacgtcatggtaaaattgttcgcatcgttgatgcggaaaaagttgaaaagaaatttctgggtcgtcctattacagtttggcgtctgtattttgaacatcctcaggatgttccgacgattcgcgaaaaaatccgcgaacatagcgccgttgtggacatatttgaatatgatattccgtttgccaaacgctatctgattgataaaggtttaatccctatggaaggcgatgaagaactgaaactgttagcgtttgacatcgaaaccctgtatcatgaaggtgaagaatttggcaaaggcccgatcatcatgatctcttatgcagatgaagaagaagctaaagtgatcacttggaagaagatcgatttaccgtatgttgaagttgtgtctagtgaacgcgaaatgatcaaacgctttctgaaaatcattcgcgaaaaagatccggatattatcattacctataatggtgatagctttgatttaccttatttagccaaacgtgccgaaaaactgggcatcaaactgacgatcggtcgtgatggtagcgaacctaaaatgcagcgcatcggcgatatgacagcagttgaagttaaaggtcgcatccattttgatctgtatcatgttattcgtcgtacaatcaatttaccgacctataccctggaagcagtgtatgaagccatctttggtaaacctaaagaaaaagtgtatgcggatgaaattgctaaagcttgggaaacgggcgaaggcttagaacgcgttgctaaatatagcatggaagatgccaaagctacctatgaactgggcaaagaatttttccctatggaagctcagctgagtcgtctggtgggtcagcctctgtgggatgtgagtcgtagtagtacgggcaatttagtggaatggtttctgctgcgcaaagcctatgaacgtaatgaattagcacctaacaaaccggatgaacgcgaatatgaacgccgcctgcgtgaatcttatgcaggcggttttgttaaagaaccggaaaaaggcctgtgggaaaatattgtgtctctggattttcgtccgctgtatccgagcatcatcattacacataatgtgtctccagataccctgaatcgcgaaggttgtcgtaattatgatgttgctccggaagtgggtcataaattttgcaaagattttccaggttttattccgagtctgctgaaacgcttactggatgaacgtcagaaaatcaaaaccaaaatgaaagcctcacaggatcctatcgaaaaaatcatgttagattatcgtcagcgtgccatcaaaattctggccaatagctattatggctattatggctatgctaaagctcgctggtattgcaaagaatgcgccgaatcagtgaccgcttggggtcgcgaatatatcgaatttgtgtggaaagaactggaagaaaaatttggctttaaagttctgtatatcgataccgatggcctgtatgcgaccattccgggtggtaaatctgaagaaattaagaagaaggccttagaatttgtggattatattaatgccaaactgccgggcctgctggaactggaatatgaaggcttttataaacgcggcttcttcgtgaccaagaaaaaatatgcactgatcgatgaagaaggtaaaatcattacacgcggcttagaaattgtgcgccgcgattggagcgaaattgccaaagaaacccaggcccgcgttctggaagccatcctgaaacatggtaatgtggaagaagcagttcgcattgttaaagaagtgacacagaaactgagcaaatatgaaatcccaccggaaaaactggccatctatgaacagattacacgtccactgcatgaatataaagccattggtccacatgttgcggttgccaaacgcttagccgctaaaggtgttaaaatcaaaccaggcatggttatcggctatattgttctgcgcggcgatggtccgatctctaatcgtgccatcttagcggaagaatatgatccacgcaaacataaatatgatgccgaatattatatcgaaaatcaggtgttaccagcagtgctgcgcattctggaaggctttggctatcgcaaagaagatttacgttggcagaaaaccaaacagacgggcctgacaagttggctgaatattaaaaaatcaggtacgggcggtggcggtgctacggttaaatttaaatataaaggcgaagaaaaagaagtggatattagtaaaatcaaaaaagtttggcgtgtgggcaaaatgatctctttcacttatgatgaaggcggcggcaaaaccggccgcggtgccgtgagcgaaaaagatgctcctaaagaactgttgcaaatgttagaaaaacagaaaaaaaattaa

SEQ ID NO: 335 - DNA, 2538 bp, Artificial Sequence
  Synthetic
atgatcttagatgcagattatatcacggaagaaggcaaaccagtgattcgcctgtttaaaaaagaaaatggcgaatttaaaatcgaacatgatcgcacctttcgcccgtatatctatgccctgctgaaagatgatagtaaaatcgaagaagttaagaaaatcacagcggaacgtcatggtaaaattgttcgcatcgttgatgcggaaaaagttgaaaagaaatttctgggtcgtcctattacagtttggcgtctgtattttgaacatcctcaggatgttccgacgattcgcgaaaaaatccgcgaacatagcgccgttgtggacatatttgaatatgatattccgtttgccaaacgctatctgattgataaaggtttaatccctatggaaggcgatgaagaactgaaactgttagcgtttgacatcgaaaccctgtatcatgaaggtgaagaatttggcaaaggcccgatcatcatgatctcttatgcagatgaagaagaagctaaagtgatcacttggaagaagatcgatttaccgtatgttgaagttgtgtctagtgaacgcgaaatgatcaaacgctttctgaaaatcattcgcgaaaaagatccggatattatcattacctataatggtgatagctttgatttaccttatttagccaaacgtgccgaaaaactgggcatcaaactgacgatcggtcgtgatggtagcgaacctaaaatgcagcgcatcggcgatatgacagcagttgaagttaaaggtcgcatccattttgatctgtatcatgttattcgtcgtacaatcaatttaccgacctataccctggaagcagtgtatgaagccatctttggtaaacctaaagaaaaagtgtatgcggatgaaattgctaaagcttgggaaacgggcgaaggcttagaacgcgttgctaaatatagcatggaagatgccaaagctacctatgaactgggcaaagaatttttccctatggaagctcagctgagtcgtctggtgggtcagcctctgtgggatgtgagtcgtagtagtacgggcaatttagtggaatggtttctgctgcgcaaagcctatgaacgtaatgaattagcacctaacaaaccggatgaacgcgaatatgaacgccgcctgcgtgaatcttatgcaggcggttttgttaaagaaccggaaaaaggcctgtgggaaaatattgtgtctctggattttcgtcgtctgtatccgagcatcatcattacacataatgtgtctccagataccctgaatcgcgaaggttgtcgtaattatgatgttgctccggaagtgggtcataaattttgcaaagattttccaggttttattccgagtctgctgaaacgcttactggatgaacgtcagaaaatcaaaaccaaaatgaaagcctcacaggatcctatcgaaaaaatcatgttagattatcgtcagcgtgccatcaaaattctggccaatagctattatggctattatggctatgctaaagctcgctggtattgcaaagaatgcgccgaatcagtgaccgcttggggtcgcgaatatatcgaatttgtgtggaaagaactggaagaaaaatttggctttaaagttctgtatatcgataccgatggcctgtatgcgaccattccgggtggtaaatctgaagaaattaagaagaaggccttagaatttgtggattatattaatgccaaactgccgggcctgctggaactggaatatgaaggcttttataaacgcggcttcttcgtgaccaagaaaaaatatgcactgatcgatgaagaaggtaaaatcattacacgcggcttagaaattgtgcgccgcgattggagcgaaattgccaaagaaacccaggcccgcgttctggaagccatcctgaaacatggtaatgtggaagaagcagttcgcattgttaaagaagtgacacagaaactgagcaaatatgaaatcccaccggaaaaactggccatctatgaacagattacacgtccactgcatgaatataaagccattggtccacatgttgcggttgccaaacgcttagccgctaaaggtgttaaaatcaaaccaggcatggttatcggctatattgttctgcgcggcgatggtccgatctctaatcgtgccatcttagcggaagaatatgatccacgcaaacataaatatgatgccgaatattatatcgaaaatcaggtgttaccagcagtgctgcgcattctggaaggctttggctatcgcaaagaagatttacgttggcagaaaaccaaacagacgggcctgacaagttggctgaatattaaaaaatcaggtacgggcggtggcggtgctacggttaaatttaaatataaaggcgaagaaaaagaagtggatattagtaaaatcaaaaaagtttggcgtgtgggcaaaatgatctctttcacttatgatgaaggcggcggcaaaaccggccgcggtgccgtgagcgaaaaagatgctcctaaagaactgttgcaaatgttagaaaaacagaaaaaaaattaa

SEQ ID NO: 336 - DNA, 2538 bp, Artificial Sequence
  Synthetic
atgatcttagatgcagattatatcacggaagaaggcaaaccagtgattcgcctgtttaaaaaagaaaatggcgaatttaaaatcgaacatgatcgcacctttcgcccgtatatctatgccctgctgaaagatgatagtaaaatcgaagaagttaagaaaatcacagcggaacgtcatggtaaaattgttcgcatcgttgatgcggaaaaagttgaaaagaaatttctgggtcgtcctattacagtttggcgtctgtattttgaacatcctcaggatgttccgacgattcgcgaaaaaatccgcgaacatagcgccgttgtggacatatttgaatatgatattccgtttgccaaacgctatctgattgataaaggtttaatccctatggaaggcgatgaagaactgaaactgttagcgtttgacatcgaaaccctgtatcatgaaggtgaagaatttggcaaaggcccgatcatcatgatctcttatgcagatgaagaagaagctaaagtgatcacttggaagaagatcgatttaccgtatgttgaagttgtgtctagtgaacgcgaaatgatcaaacgctttctgaaaatcattcgcgaaaaagatccggatattatcattacctataatggtgatagctttgatttaccttatttagccaaacgtgccgaaaaactgggcatcaaactgacgatcggtcgtgatggtagcgaacctaaaatgcagcgcatcggcgatatgacagcagttgaagttaaaggtcgcatccattttgatctgtatcatgttattcgtcgtacaatcaatttaccgacctataccctggaagcagtgtatgaagccatctttggtaaacctaaagaaaaagtgtatgcggatgaaattgctaaagcttgggaaacgggcgaaggcttagaacgcgttgctaaatatagcatggaagatgccaaagctacctatgaactgggcaaagaatttttccctatggaagctcagctgagtcgtctggtgggtcagcctctgtgggatgtgagtcgtagtagtacgggcaatttagtggaatggtttctgctgcgcaaagcctatgaacgtaatgaattagcacctaacaaaccggatgaacgcgaatatgaacgccgcctgcgtgaatcttatgcaggcggttttgttaaagaaccggaaaaaggcctgtgggaaaatattgtgtctctggattttcgtagcctgtatccgagcatcatcattacacataatgtgtctccagataccctgaatcgcgaaggttgtcgtaattatgatgttgctccggaagtgggtcataaattttgcaaagattttccaggttttattccgagtctgctgaaacgcttactggatgaacgtcagaaaatcaaaaccaaaatgaaagcctcacaggatcctatcgaaaaaatcatgttagattatcgtcagcgtgccatcaaaattctggccaatagctattatggctattatggctatgctaaagctcgctggtattgcaaagaatgcgccgaatcagtgaccgcttggggtcgcgaatatatcgaatttgtgtggaaagaactggaagaaaaatttggctttaaagttctgtatatcgataccgatggcctgtatgcgaccattccgggtggtaaatctgaagaaattaagaagaaggccttagaatttgtggattatattaatgccaaactgccgggcctgctggaactggaatatgaaggcttttataaacgcggcttcttcgtgaccaagaaaaaatatgcactgatcgatgaagaaggtaaaatcattacacgcggcttagaaattgtgcgccgcgattggagcgaaattgccaaagaaacccaggcccgcgttctggaagccatcctgaaacatggtaatgtggaagaagcagttcgcattgttaaagaagtgacacagaaactgagcaaatatgaaatcccaccggaaaaactggccatctatgaacagattacacgtccactgcatgaatataaagccattggtccacatgttgcggttgccaaacgcttagccgctaaaggtgttaaaatcaaaccaggcatggttatcggctatattgttctgcgcggcgatggtccgatctctaatcgtgccatcttagcggaagaatatgatccacgcaaacataaatatgatgccgaatattatatcgaaaatcaggtgttaccagcagtgctgcgcattctggaaggctttggctatcgcaaagaagatttacgttggcagaaaaccaaacagacgggcctgacaagttggctgaatattaaaaaatcaggtacgggcggtggcggtgctacggttaaatttaaatataaaggcgaagaaaaagaagtggatattagtaaaatcaaaaaagtttggcgtgtgggcaaaatgatctctttcacttatgatgaaggcggcggcaaaaccggccgcggtgccgtgagcgaaaaagatgctcctaaagaactgttgcaaatgttagaaaaacagaaaaaaaattaa

SEQ ID NO: 337 - DNA, 2538 bp, Artificial Sequence
  Synthetic
atgatcttagatgcagattatatcacggaagaaggcaaaccagtgattcgcctgtttaaaaaagaaaatggcgaatttaaaatcgaacatgatcgcacctttcgcccgtatatctatgccctgctgaaagatgatagtaaaatcgaagaagttaagaaaatcacagcggaacgtcatggtaaaattgttcgcatcgttgatgcggaaaaagttgaaaagaaatttctgggtcgtcctattacagtttggcgtctgtattttgaacatcctcaggatgttccgacgattcgcgaaaaaatccgcgaacatagcgccgttgtggacatatttgaatatgatattccgtttgccaaacgctatctgattgataaaggtttaatccctatggaaggcgatgaagaactgaaactgttagcgtttgacatcgaaaccctgtatcatgaaggtgaagaatttggcaaaggcccgatcatcatgatctcttatgcagatgaagaagaagctaaagtgatcacttggaagaagatcgatttaccgtatgttgaagttgtgtctagtgaacgcgaaatgatcaaacgctttctgaaaatcattcgcgaaaaagatccggatattatcattacctataatggtgatagctttgatttaccttatttagccaaacgtgccgaaaaactgggcatcaaactgacgatcggtcgtgatggtagcgaacctaaaatgcagcgcatcggcgatatgacagcagttgaagttaaaggtcgcatccattttgatctgtatcatgttattcgtcgtacaatcaatttaccgacctataccctggaagcagtgtatgaagccatctttggtaaacctaaagaaaaagtgtatgcggatgaaattgctaaagcttgggaaacgggcgaaggcttagaacgcgttgctaaatatagcatggaagatgccaaagctacctatgaactgggcaaagaatttttccctatggaagctcagctgagtcgtctggtgggtcagcctctgtgggatgtgagtcgtagtagtacgggcaatttagtggaatggtttctgctgcgcaaagcctatgaacgtaatgaattagcacctaacaaaccggatgaacgcgaatatgaacgccgcctgcgtgaatcttatgcaggcggttttgttaaagaaccggaaaaaggcctgtgggaaaatattgtgtctctggattttcgtacactgtatccgagcatcatcattacacataatgtgtctccagataccctgaatcgcgaaggttgtcgtaattatgatgttgctccggaagtgggtcataaattttgcaaagattttccaggttttattccgagtctgctgaaacgcttactggatgaacgtcagaaaatcaaaaccaaaatgaaagcctcacaggatcctatcgaaaaaatcatgttagattatcgtcagcgtgccatcaaaattctggccaatagctattatggctattatggctatgctaaagctcgctggtattgcaaagaatgcgccgaatcagtgaccgcttggggtcgcgaatatatcgaatttgtgtggaaagaactggaagaaaaatttggctttaaagttctgtatatcgataccgatggcctgtatgcgaccattccgggtggtaaatctgaagaaattaagaagaaggccttagaatttgtggattatattaatgccaaactgccgggcctgctggaactggaatatgaaggcttttataaacgcggcttcttcgtgaccaagaaaaaatatgcactgatcgatgaagaaggtaaaatcattacacgcggcttagaaattgtgcgccgcgattggagcgaaattgccaaagaaacccaggcccgcgttctggaagccatcctgaaacatggtaatgtggaagaagcagttcgcattgttaaagaagtgacacagaaactgagcaaatatgaaatcccaccggaaaaactggccatctatgaacagattacacgtccactgcatgaatataaagccattggtccacatgttgcggttgccaaacgcttagccgctaaaggtgttaaaatcaaaccaggcatggttatcggctatattgttctgcgcggcgatggtccgatctctaatcgtgccatcttagcggaagaatatgatccacgcaaacataaatatgatgccgaatattatatcgaaaatcaggtgttaccagcagtgctgcgcattctggaaggctttggctatcgcaaagaagatttacgttggcagaaaaccaaacagacgggcctgacaagttggctgaatattaaaaaatcaggtacgggcggtggcggtgctacggttaaatttaaatataaaggcgaagaaaaagaagtggatattagtaaaatcaaaaaagtttggcgtgtgggcaaaatgatctctttcacttatgatgaaggcggcggcaaaaccggccgcggtgccgtgagcgaaaaagatgctcctaaagaactgttgcaaatgttagaaaaacagaaaaaaaattaa

SEQ ID NO: 338 - DNA, 2538 bp, Artificial Sequence
  Synthetic
atgatcttagatgcagattatatcacggaagaaggcaaaccagtgattcgcctgtttaaaaaagaaaatggcgaatttaaaatcgaacatgatcgcacctttcgcccgtatatctatgccctgctgaaagatgatagtaaaatcgaagaagttaagaaaatcacagcggaacgtcatggtaaaattgttcgcatcgttgatgcggaaaaagttgaaaagaaatttctgggtcgtcctattacagtttggcgtctgtattttgaacatcctcaggatgttccgacgattcgcgaaaaaatccgcgaacatagcgccgttgtggacatatttgaatatgatattccgtttgccaaacgctatctgattgataaaggtttaatccctatggaaggcgatgaagaactgaaactgttagcgtttgacatcgaaaccctgtatcatgaaggtgaagaatttggcaaaggcccgatcatcatgatctcttatgcagatgaagaagaagctaaagtgatcacttggaagaagatcgatttaccgtatgttgaagttgtgtctagtgaacgcgaaatgatcaaacgctttctgaaaatcattcgcgaaaaagatccggatattatcattacctataatggtgatagctttgatttaccttatttagccaaacgtgccgaaaaactgggcatcaaactgacgatcggtcgtgatggtagcgaacctaaaatgcagcgcatcggcgatatgacagcagttgaagttaaaggtcgcatccattttgatctgtatcatgttattcgtcgtacaatcaatttaccgacctataccctggaagcagtgtatgaagccatctttggtaaacctaaagaaaaagtgtatgcggatgaaattgctaaagcttgggaaacgggcgaaggcttagaacgcgttgctaaatatagcatggaagatgccaaagctacctatgaactgggcaaagaatttttccctatggaagctcagctgagtcgtctggtgggtcagcctctgtgggatgtgagtcgtagtagtacgggcaatttagtggaatggtttctgctgcgcaaagcctatgaacgtaatgaattagcacctaacaaaccggatgaacgcgaatatgaacgccgcctgcgtgaatcttatgcaggcggttttgttaaagaaccggaaaaaggcctgtgggaaaatattgtgtctctggattttcgtgcagattatccgagcatcatcattacacataatgtgtctccagataccctgaatcgcgaaggttgtcgtaattatgatgttgctccggaagtgggtcataaattttgcaaagattttccaggttttattccgagtctgctgaaacgcttactggatgaacgtcagaaaatcaaaaccaaaatgaaagcctcacaggatcctatcgaaaaaatcatgttagattatcgtcagcgtgccatcaaaattctggccaatagctattatggctattatggctatgctaaagctcgctggtattgcaaagaatgcgccgaatcagtgaccgcttggggtcgcgaatatatcgaatttgtgtggaaagaactggaagaaaaatttggctttaaagttctgtatatcgataccgatggcctgtatgcgaccattccgggtggtaaatctgaagaaattaagaagaaggccttagaatttgtggattatattaatgccaaactgccgggcctgctggaactggaatatgaaggcttttataaacgcggcttcttcgtgaccaagaaaaaatatgcactgatcgatgaagaaggtaaaatcattacacgcggcttagaaattgtgcgccgcgattggagcgaaattgccaaagaaacccaggcccgcgttctggaagccatcctgaaacatggtaatgtggaagaagcagttcgcattgttaaagaagtgacacagaaactgagcaaatatgaaatcccaccggaaaaactggccatctatgaacagattacacgtccactgcatgaatataaagccattggtccacatgttgcggttgccaaacgcttagccgctaaaggtgttaaaatcaaaccaggcatggttatcggctatattgttctgcgcggcgatggtccgatctctaatcgtgccatcttagcggaagaatatgatccacgcaaacataaatatgatgccgaatattatatcgaaaatcaggtgttaccagcagtgctgcgcattctggaaggctttggctatcgcaaagaagatttacgttggcagaaaaccaaacagacgggcctgacaagttggctgaatattaaaaaatcaggtacgggcggtggcggtgctacggttaaatttaaatataaaggcgaagaaaaagaagtggatattagtaaaatcaaaaaagtttggcgtgtgggcaaaatgatctctttcacttatgatgaaggcggcggcaaaaccggccgcggtgccgtgagcgaaaaagatgctcctaaagaactgttgcaaatgttagaaaaacagaaaaaaaattaa

SEQ ID NO: 339 - DNA, 2538 bp, Artificial Sequence
  Synthetic
atgatcttagatgcagattatatcacggaagaaggcaaaccagtgattcgcctgtttaaaaaagaaaatggcgaatttaaaatcgaacatgatcgcacctttcgcccgtatatctatgccctgctgaaagatgatagtaaaatcgaagaagttaagaaaatcacagcggaacgtcatggtaaaattgttcgcatcgttgatgcggaaaaagttgaaaagaaatttctgggtcgtcctattacagtttggcgtctgtattttgaacatcctcaggatgttccgacgattcgcgaaaaaatccgcgaacatagcgccgttgtggacatatttgaatatgatattccgtttgccaaacgctatctgattgataaaggtttaatccctatggaaggcgatgaagaactgaaactgttagcgtttgacatcgaaaccctgtatcatgaaggtgaagaatttggcaaaggcccgatcatcatgatctcttatgcagatgaagaagaagctaaagtgatcacttggaagaagatcgatttaccgtatgttgaagttgtgtctagtgaacgcgaaatgatcaaacgctttctgaaaatcattcgcgaaaaagatccggatattatcattacctataatggtgatagctttgatttaccttatttagccaaacgtgccgaaaaactgggcatcaaactgacgatcggtcgtgatggtagcgaacctaaaatgcagcgcatcggcgatatgacagcagttgaagttaaaggtcgcatccattttgatctgtatcatgttattcgtcgtacaatcaatttaccgacctataccctggaagcagtgtatgaagccatctttggtaaacctaaagaaaaagtgtatgcggatgaaattgctaaagcttgggaaacgggcgaaggcttagaacgcgttgctaaatatagcatggaagatgccaaagctacctatgaactgggcaaagaatttttccctatggaagctcagctgagtcgtctggtgggtcagcctctgtgggatgtgagtcgtagtagtacgggcaatttagtggaatggtttctgctgcgcaaagcctatgaacgtaatgaattagcacctaacaaaccggatgaacgcgaatatgaacgccgcctgcgtgaatcttatgcaggcggttttgttaaagaaccggaaaaaggcctgtgggaaaatattgtgtctctggattttcgtgcattttatccgagcatcatcattacacataatgtgtctccagataccctgaatcgcgaaggttgtcgtaattatgatgttgctccggaagtgggtcataaattttgcaaagattttccaggttttattccgagtctgctgaaacgcttactggatgaacgtcagaaaatcaaaaccaaaatgaaagcctcacaggatcctatcgaaaaaatcatgttagattatcgtcagcgtgccatcaaaattctggccaatagctattatggctattatggctatgctaaagctcgctggtattgcaaagaatgcgccgaatcagtgaccgcttggggtcgcgaatatatcgaatttgtgtggaaagaactggaagaaaaatttggctttaaagttctgtatatcgataccgatggcctgtatgcgaccattccgggtggtaaatctgaagaaattaagaagaaggccttagaatttgtggattatattaatgccaaactgccgggcctgctggaactggaatatgaaggcttttataaacgcggcttcttcgtgaccaagaaaaaatatgcactgatcgatgaagaaggtaaaatcattacacgcggcttagaaattgtgcgccgcgattggagcgaaattgccaaagaaacccaggcccgcgttctggaagccatcctgaaacatggtaatgtggaagaagcagttcgcattgttaaagaagtgacacagaaactgagcaaatatgaaatcccaccggaaaaactggccatctatgaacagattacacgtccactgcatgaatataaagccattggtccacatgttgcggttgccaaacgcttagccgctaaaggtgttaaaatcaaaccaggcatggttatcggctatattgttctgcgcggcgatggtccgatctctaatcgtgccatcttagcggaagaatatgatccacgcaaacataaatatgatgccgaatattatatcgaaaatcaggtgttaccagcagtgctgcgcattctggaaggctttggctatcgcaaagaagatttacgttggcagaaaaccaaacagacgggcctgacaagttggctgaatattaaaaaatcaggtacgggcggtggcggtgctacggttaaatttaaatataaaggcgaagaaaaagaagtggatattagtaaaatcaaaaaagtttggcgtgtgggcaaaatgatctctttcacttatgatgaaggcggcggcaaaaccggccgcggtgccgtgagcgaaaaagatgctcctaaagaactgttgcaaatgttagaaaaacagaaaaaaaattaa

SEQ ID NO: 340 - DNA, 2538 bp, Artificial Sequence
  Synthetic
atgatcttagatgcagattatatcacggaagaaggcaaaccagtgattcgcctgtttaaaaaagaaaatggcgaatttaaaatcgaacatgatcgcacctttcgcccgtatatctatgccctgctgaaagatgatagtaaaatcgaagaagttaagaaaatcacagcggaacgtcatggtaaaattgttcgcatcgttgatgcggaaaaagttgaaaagaaatttctgggtcgtcctattacagtttggcgtctgtattttgaacatcctcaggatgttccgacgattcgcgaaaaaatccgcgaacatagcgccgttgtggacatatttgaatatgatattccgtttgccaaacgctatctgattgataaaggtttaatccctatggaaggcgatgaagaactgaaactgttagcgtttgacatcgaaaccctgtatcatgaaggtgaagaatttggcaaaggcccgatcatcatgatctcttatgcagatgaagaagaagctaaagtgatcacttggaagaagatcgatttaccgtatgttgaagttgtgtctagtgaacgcgaaatgatcaaacgctttctgaaaatcattcgcgaaaaagatccggatattatcattacctataatggtgatagctttgatttaccttatttagccaaacgtgccgaaaaactgggcatcaaactgacgatcggtcgtgatggtagcgaacctaaaatgcagcgcatcggcgatatgacagcagttgaagttaaaggtcgcatccattttgatctgtatcatgttattcgtcgtacaatcaatttaccgacctataccctggaagcagtgtatgaagccatctttggtaaacctaaagaaaaagtgtatgcggatgaaattgctaaagcttgggaaacgggcgaaggcttagaacgcgttgctaaatatagcatggaagatgccaaagctacctatgaactgggcaaagaatttttccctatggaagctcagctgagtcgtctggtgggtcagcctctgtgggatgtgagtcgtagtagtacgggcaatttagtggaatggtttctgctgcgcaaagcctatgaacgtaatgaattagcacctaacaaaccggatgaacgcgaatatgaacgccgcctgcgtgaatcttatgcaggcggttttgttaaagaaccggaaaaaggcctgtgggaaaatattgtgtctctggattttcgtgcaggctatccgagcatcatcattacacataatgtgtctccagataccctgaatcgcgaaggttgtcgtaattatgatgttgctccggaagtgggtcataaattttgcaaagattttccaggttttattccgagtctgctgaaacgcttactggatgaacgtcagaaaatcaaaaccaaaatgaaagcctcacaggatcctatcgaaaaaatcatgttagattatcgtcagcgtgccatcaaaattctggccaatagctattatggctattatggctatgctaaagctcgctggtattgcaaagaatgcgccgaatcagtgaccgcttggggtcgcgaatatatcgaatttgtgtggaaagaactggaagaaaaatttggctttaaagttctgtatatcgataccgatggcctgtatgcgaccattccgggtggtaaatctgaagaaattaagaagaaggccttagaatttgtggattatattaatgccaaactgccgggcctgctggaactggaatatgaaggcttttataaacgcggcttcttcgtgaccaagaaaaaatatgcactgatcgatgaagaaggtaaaatcattacacgcggcttagaaattgtgcgccgcgattggagcgaaattgccaaagaaacccaggcccgcgttctggaagccatcctgaaacatggtaatgtggaagaagcagttcgcattgttaaagaagtgacacagaaactgagcaaatatgaaatcccaccggaaaaactggccatctatgaacagattacacgtccactgcatgaatataaagccattggtccacatgttgcggttgccaaacgcttagccgctaaaggtgttaaaatcaaaccaggcatggttatcggctatattgttctgcgcggcgatggtccgatctctaatcgtgccatcttagcggaagaatatgatccacgcaaacataaatatgatgccgaatattatatcgaaaatcaggtgttaccagcagtgctgcgcattctggaaggctttggctatcgcaaagaagatttacgttggcagaaaaccaaacagacgggcctgacaagttggctgaatattaaaaaatcaggtacgggcggtggcggtgctacggttaaatttaaatataaaggcgaagaaaaagaagtggatattagtaaaatcaaaaaagtttggcgtgtgggcaaaatgatctctttcacttatgatgaaggcggcggcaaaaccggccgcggtgccgtgagcgaaaaagatgctcctaaagaactgttgcaaatgttagaaaaacagaaaaaaaattaa

SEQ ID NO: 341 - DNA, 2538 bp, Artificial Sequence
  Synthetic
atgatcttagatgcagattatatcacggaagaaggcaaaccagtgattcgcctgtttaaaaaagaaaatggcgaatttaaaatcgaacatgatcgcacctttcgcccgtatatctatgccctgctgaaagatgatagtaaaatcgaagaagttaagaaaatcacagcggaacgtcatggtaaaattgttcgcatcgttgatgcggaaaaagttgaaaagaaatttctgggtcgtcctattacagtttggcgtctgtattttgaacatcctcaggatgttccgacgattcgcgaaaaaatccgcgaacatagcgccgttgtggacatatttgaatatgatattccgtttgccaaacgctatctgattgataaaggtttaatccctatggaaggcgatgaagaactgaaactgttagcgtttgacatcgaaaccctgtatcatgaaggtgaagaatttggcaaaggcccgatcatcatgatctcttatgcagatgaagaagaagctaaagtgatcacttggaagaagatcgatttaccgtatgttgaagttgtgtctagtgaacgcgaaatgatcaaacgctttctgaaaatcattcgcgaaaaagatccggatattatcattacctataatggtgatagctttgatttaccttatttagccaaacgtgccgaaaaactgggcatcaaactgacgatcggtcgtgatggtagcgaacctaaaatgcagcgcatcggcgatatgacagcagttgaagttaaaggtcgcatccattttgatctgtatcatgttattcgtcgtacaatcaatttaccgacctataccctggaagcagtgtatgaagccatctttggtaaacctaaagaaaaagtgtatgcggatgaaattgctaaagcttgggaaacgggcgaaggcttagaacgcgttgctaaatatagcatggaagatgccaaagctacctatgaactgggcaaagaatttttccctatggaagctcagctgagtcgtctggtgggtcagcctctgtgggatgtgagtcgtagtagtacgggcaatttagtggaatggtttctgctgcgcaaagcctatgaacgtaatgaattagcacctaacaaaccggatgaacgcgaatatgaacgccgcctgcgtgaatcttatgcaggcggttttgttaaagaaccggaaaaaggcctgtgggaaaatattgtgtctctggattttcgtgcaccatatccgagcatcatcattacacataatgtgtctccagataccctgaatcgcgaaggttgtcgtaattatgatgttgctccggaagtgggtcataaattttgcaaagattttccaggttttattccgagtctgctgaaacgcttactggatgaacgtcagaaaatcaaaaccaaaatgaaagcctcacaggatcctatcgaaaaaatcatgttagattatcgtcagcgtgccatcaaaattctggccaatagctattatggctattatggctatgctaaagctcgctggtattgcaaagaatgcgccgaatcagtgaccgcttggggtcgcgaatatatcgaatttgtgtggaaagaactggaagaaaaatttggctttaaagttctgtatatcgataccgatggcctgtatgcgaccattccgggtggtaaatctgaagaaattaagaagaaggccttagaatttgtggattatattaatgccaaactgccgggcctgctggaactggaatatgaaggcttttataaacgcggcttcttcgtgaccaagaaaaaatatgcactgatcgatgaagaaggtaaaatcattacacgcggcttagaaattgtgcgccgcgattggagcgaaattgccaaagaaacccaggcccgcgttctggaagccatcctgaaacatggtaatgtggaagaagcagttcgcattgttaaagaagtgacacagaaactgagcaaatatgaaatcccaccggaaaaactggccatctatgaacagattacacgtccactgcatgaatataaagccattggtccacatgttgcggttgccaaacgcttagccgctaaaggtgttaaaatcaaaccaggcatggttatcggctatattgttctgcgcggcgatggtccgatctctaatcgtgccatcttagcggaagaatatgatccacgcaaacataaatatgatgccgaatattatatcgaaaatcaggtgttaccagcagtgctgcgcattctggaaggctttggctatcgcaaagaagatttacgttggcagaaaaccaaacagacgggcctgacaagttggctgaatattaaaaaatcaggtacgggcggtggcggtgctacggttaaatttaaatataaaggcgaagaaaaagaagtggatattagtaaaatcaaaaaagtttggcgtgtgggcaaaatgatctctttcacttatgatgaaggcggcggcaaaaccggccgcggtgccgtgagcgaaaaagatgctcctaaagaactgttgcaaatgttagaaaaacagaaaaaaaattaa

SEQ ID NO: 342 - DNA, 2538 bp, Artificial Sequence
  Synthetic
atgatcttagatgcagattatatcacggaagaaggcaaaccagtgattcgcctgtttaaaaaagaaaatggcgaatttaaaatcgaacatgatcgcacctttcgcccgtatatctatgccctgctgaaagatgatagtaaaatcgaagaagttaagaaaatcacagcggaacgtcatggtaaaattgttcgcatcgttgatgcggaaaaagttgaaaagaaatttctgggtcgtcctattacagtttggcgtctgtattttgaacatcctcaggatgttccgacgattcgcgaaaaaatccgcgaacatagcgccgttgtggacatatttgaatatgatattccgtttgccaaacgctatctgattgataaaggtttaatccctatggaaggcgatgaagaactgaaactgttagcgtttgacatcgaaaccctgtatcatgaaggtgaagaatttggcaaaggcccgatcatcatgatctcttatgcagatgaagaagaagctaaagtgatcacttggaagaagatcgatttaccgtatgttgaagttgtgtctagtgaacgcgaaatgatcaaacgctttctgaaaatcattcgcgaaaaagatccggatattatcattacctataatggtgatagctttgatttaccttatttagccaaacgtgccgaaaaactgggcatcaaactgacgatcggtcgtgatggtagcgaacctaaaatgcagcgcatcggcgatatgacagcagttgaagttaaaggtcgcatccattttgatctgtatcatgttattcgtcgtacaatcaatttaccgacctataccctggaagcagtgtatgaagccatctttggtaaacctaaagaaaaagtgtatgcggatgaaattgctaaagcttgggaaacgggcgaaggcttagaacgcgttgctaaatatagcatggaagatgccaaagctacctatgaactgggcaaagaatttttccctatggaagctcagctgagtcgtctggtgggtcagcctctgtgggatgtgagtcgtagtagtacgggcaatttagtggaatggtttctgctgcgcaaagcctatgaacgtaatgaattagcacctaacaaaccggatgaacgcgaatatgaacgccgcctgcgtgaatcttatgcaggcggttttgttaaagaaccggaaaaaggcctgtgggaaaatattgtgtctctggattttcgtgcacgttatccgagcatcatcattacacataatgtgtctccagataccctgaatcgcgaaggttgtcgtaattatgatgttgctccggaagtgggtcataaattttgcaaagattttccaggttttattccgagtctgctgaaacgcttactggatgaacgtcagaaaatcaaaaccaaaatgaaagcctcacaggatcctatcgaaaaaatcatgttagattatcgtcagcgtgccatcaaaattctggccaatagctattatggctattatggctatgctaaagctcgctggtattgcaaagaatgcgccgaatcagtgaccgcttggggtcgcgaatatatcgaatttgtgtggaaagaactggaagaaaaatttggctttaaagttctgtatatcgataccgatggcctgtatgcgaccattccgggtggtaaatctgaagaaattaagaagaaggccttagaatttgtggattatattaatgccaaactgccgggcctgctggaactggaatatgaaggcttttataaacgcggcttcttcgtgaccaagaaaaaatatgcactgatcgatgaagaaggtaaaatcattacacgcggcttagaaattgtgcgccgcgattggagcgaaattgccaaagaaacccaggcccgcgttctggaagccatcctgaaacatggtaatgtggaagaagcagttcgcattgttaaagaagtgacacagaaactgagcaaatatgaaatcccaccggaaaaactggccatctatgaacagattacacgtccactgcatgaatataaagccattggtccacatgttgcggttgccaaacgcttagccgctaaaggtgttaaaatcaaaccaggcatggttatcggctatattgttctgcgcggcgatggtccgatctctaatcgtgccatcttagcggaagaatatgatccacgcaaacataaatatgatgccgaatattatatcgaaaatcaggtgttaccagcagtgctgcgcattctggaaggctttggctatcgcaaagaagatttacgttggcagaaaaccaaacagacgggcctgacaagttggctgaatattaaaaaatcaggtacgggcggtggcggtgctacggttaaatttaaatataaaggcgaagaaaaagaagtggatattagtaaaatcaaaaaagtttggcgtgtgggcaaaatgatctctttcacttatgatgaaggcggcggcaaaaccggccgcggtgccgtgagcgaaaaagatgctcctaaagaactgttgcaaatgttagaaaaacagaaaaaaaattaa

SEQ ID NO: 343 - DNA, 2538 bp, Artificial Sequence
  Synthetic
atgatcttagatgcagattatatcacggaagaaggcaaaccagtgattcgcctgtttaaaaaagaaaatggcgaatttaaaatcgaacatgatcgcacctttcgcccgtatatctatgccctgctgaaagatgatagtaaaatcgaagaagttaagaaaatcacagcggaacgtcatggtaaaattgttcgcatcgttgatgcggaaaaagttgaaaagaaatttctgggtcgtcctattacagtttggcgtctgtattttgaacatcctcaggatgttccgacgattcgcgaaaaaatccgcgaacatagcgccgttgtggacatatttgaatatgatattccgtttgccaaacgctatctgattgataaaggtttaatccctatggaaggcgatgaagaactgaaactgttagcgtttgacatcgaaaccctgtatcatgaaggtgaagaatttggcaaaggcccgatcatcatgatctcttatgcagatgaagaagaagctaaagtgatcacttggaagaagatcgatttaccgtatgttgaagttgtgtctagtgaacgcgaaatgatcaaacgctttctgaaaatcattcgcgaaaaagatccggatattatcattacctataatggtgatagctttgatttaccttatttagccaaacgtgccgaaaaactgggcatcaaactgacgatcggtcgtgatggtagcgaacctaaaatgcagcgcatcggcgatatgacagcagttgaagttaaaggtcgcatccattttgatctgtatcatgttattcgtcgtacaatcaatttaccgacctataccctggaagcagtgtatgaagccatctttggtaaacctaaagaaaaagtgtatgcggatgaaattgctaaagcttgggaaacgggcgaaggcttagaacgcgttgctaaatatagcatggaagatgccaaagctacctatgaactgggcaaagaatttttccctatggaagctcagctgagtcgtctggtgggtcagcctctgtgggatgtgagtcgtagtagtacgggcaatttagtggaatggtttctgctgcgcaaagcctatgaacgtaatgaattagcacctaacaaaccggatgaacgcgaatatgaacgccgcctgcgtgaatcttatgcaggcggttttgttaaagaaccggaaaaaggcctgtgggaaaatattgtgtctctggattttcgtgcatcttatccgagcatcatcattacacataatgtgtctccagataccctgaatcgcgaaggttgtcgtaattatgatgttgctccggaagtgggtcataaattttgcaaagattttccaggttttattccgagtctgctgaaacgcttactggatgaacgtcagaaaatcaaaaccaaaatgaaagcctcacaggatcctatcgaaaaaatcatgttagattatcgtcagcgtgccatcaaaattctggccaatagctattatggctattatggctatgctaaagctcgctggtattgcaaagaatgcgccgaatcagtgaccgcttggggtcgcgaatatatcgaatttgtgtggaaagaactggaagaaaaatttggctttaaagttctgtatatcgataccgatggcctgtatgcgaccattccgggtggtaaatctgaagaaattaagaagaaggccttagaatttgtggattatattaatgccaaactgccgggcctgctggaactggaatatgaaggcttttataaacgcggcttcttcgtgaccaagaaaaaatatgcactgatcgatgaagaaggtaaaatcattacacgcggcttagaaattgtgcgccgcgattggagcgaaattgccaaagaaacccaggcccgcgttctggaagccatcctgaaacatggtaatgtggaagaagcagttcgcattgttaaagaagtgacacagaaactgagcaaatatgaaatcccaccggaaaaactggccatctatgaacagattacacgtccactgcatgaatataaagccattggtccacatgttgcggttgccaaacgcttagccgctaaaggtgttaaaatcaaaccaggcatggttatcggctatattgttctgcgcggcgatggtccgatctctaatcgtgccatcttagcggaagaatatgatccacgcaaacataaatatgatgccgaatattatatcgaaaatcaggtgttaccagcagtgctgcgcattctggaaggctttggctatcgcaaagaagatttacgttggcagaaaaccaaacagacgggcctgacaagttggctgaatattaaaaaatcaggtacgggcggtggcggtgctacggttaaatttaaatataaaggcgaagaaaaagaagtggatattagtaaaatcaaaaaagtttggcgtgtgggcaaaatgatctctttcacttatgatgaaggcggcggcaaaaccggccgcggtgccgtgagcgaaaaagatgctcctaaagaactgttgcaaatgttagaaaaacagaaaaaaaattaa

SEQ ID NO: 344 - DNA, 2538 bp, Artificial Sequence
  Synthetic
atgatcttagatgcagattatatcacggaagaaggcaaaccagtgattcgcctgtttaaaaaagaaaatggcgaatttaaaatcgaacatgatcgcacctttcgcccgtatatctatgccctgctgaaagatgatagtaaaatcgaagaagttaagaaaatcacagcggaacgtcatggtaaaattgttcgcatcgttgatgcggaaaaagttgaaaagaaatttctgggtcgtcctattacagtttggcgtctgtattttgaacatcctcaggatgttccgacgattcgcgaaaaaatccgcgaacatagcgccgttgtggacatatttgaatatgatattccgtttgccaaacgctatctgattgataaaggtttaatccctatggaaggcgatgaagaactgaaactgttagcgtttgacatcgaaaccctgtatcatgaaggtgaagaatttggcaaaggcccgatcatcatgatctcttatgcagatgaagaagaagctaaagtgatcacttggaagaagatcgatttaccgtatgttgaagttgtgtctagtgaacgcgaaatgatcaaacgctttctgaaaatcattcgcgaaaaagatccggatattatcattacctataatggtgatagctttgatttaccttatttagccaaacgtgccgaaaaactgggcatcaaactgacgatcggtcgtgatggtagcgaacctaaaatgcagcgcatcggcgatatgacagcagttgaagttaaaggtcgcatccattttgatctgtatcatgttattcgtcgtacaatcaatttaccgacctataccctggaagcagtgtatgaagccatctttggtaaacctaaagaaaaagtgtatgcggatgaaattgctaaagcttgggaaacgggcgaaggcttagaacgcgttgctaaatatagcatggaagatgccaaagctacctatgaactgggcaaagaatttttccctatggaagctcagctgagtcgtctggtgggtcagcctctgtgggatgtgagtcgtagtagtacgggcaatttagtggaatggtttctgctgcgcaaagcctatgaacgtaatgaattagcacctaacaaaccggatgaacgcgaatatgaacgccgcctgcgtgaatcttatgcaggcggttttgttaaagaaccggaaaaaggcctgtgggaaaatattgtgtctctggattttcgtgcaacatatccgagcatcatcattacacataatgtgtctccagataccctgaatcgcgaaggttgtcgtaattatgatgttgctccggaagtgggtcataaattttgcaaagattttccaggttttattccgagtctgctgaaacgcttactggatgaacgtcagaaaatcaaaaccaaaatgaaagcctcacaggatcctatcgaaaaaatcatgttagattatcgtcagcgtgccatcaaaattctggccaatagctattatggctattatggctatgctaaagctcgctggtattgcaaagaatgcgccgaatcagtgaccgcttggggtcgcgaatatatcgaatttgtgtggaaagaactggaagaaaaatttggctttaaagttctgtatatcgataccgatggcctgtatgcgaccattccgggtggtaaatctgaagaaattaagaagaaggccttagaatttgtggattatattaatgccaaactgccgggcctgctggaactggaatatgaaggcttttataaacgcggcttcttcgtgaccaagaaaaaatatgcactgatcgatgaagaaggtaaaatcattacacgcggcttagaaattgtgcgccgcgattggagcgaaattgccaaagaaacccaggcccgcgttctggaagccatcctgaaacatggtaatgtggaagaagcagttcgcattgttaaagaagtgacacagaaactgagcaaatatgaaatcccaccggaaaaactggccatctatgaacagattacacgtccactgcatgaatataaagccattggtccacatgttgcggttgccaaacgcttagccgctaaaggtgttaaaatcaaaccaggcatggttatcggctatattgttctgcgcggcgatggtccgatctctaatcgtgccatcttagcggaagaatatgatccacgcaaacataaatatgatgccgaatattatatcgaaaatcaggtgttaccagcagtgctgcgcattctggaaggctttggctatcgcaaagaagatttacgttggcagaaaaccaaacagacgggcctgacaagttggctgaatattaaaaaatcaggtacgggcggtggcggtgctacggttaaatttaaatataaaggcgaagaaaaagaagtggatattagtaaaatcaaaaaagtttggcgtgtgggcaaaatgatctctttcacttatgatgaaggcggcggcaaaaccggccgcggtgccgtgagcgaaaaagatgctcctaaagaactgttgcaaatgttagaaaaacagaaaaaaaattaa

SEQ ID NO: 345 - DNA, 2538 bp, Artificial Sequence
  Synthetic
atgatcttagatgcagattatatcacggaagaaggcaaaccagtgattcgcctgtttaaaaaagaaaatggcgaatttaaaatcgaacatgatcgcacctttcgcccgtatatctatgccctgctgaaagatgatagtaaaatcgaagaagttaagaaaatcacagcggaacgtcatggtaaaattgttcgcatcgttgatgcggaaaaagttgaaaagaaatttctgggtcgtcctattacagtttggcgtctgtattttgaacatcctcaggatgttccgacgattcgcgaaaaaatccgcgaacatagcgccgttgtggacatatttgaatatgatattccgtttgccaaacgctatctgattgataaaggtttaatccctatggaaggcgatgaagaactgaaactgttagcgtttgacatcgaaaccctgtatcatgaaggtgaagaatttggcaaaggcccgatcatcatgatctcttatgcagatgaagaagaagctaaagtgatcacttggaagaagatcgatttaccgtatgttgaagttgtgtctagtgaacgcgaaatgatcaaacgctttctgaaaatcattcgcgaaaaagatccggatattatcattacctataatggtgatagctttgatttaccttatttagccaaacgtgccgaaaaactgggcatcaaactgacgatcggtcgtgatggtagcgaacctaaaatgcagcgcatcggcgatatgacagcagttgaagttaaaggtcgcatccattttgatctgtatcatgttattcgtcgtacaatcaatttaccgacctataccctggaagcagtgtatgaagccatctttggtaaacctaaagaaaaagtgtatgcggatgaaattgctaaagcttgggaaacgggcgaaggcttagaacgcgttgctaaatatagcatggaagatgccaaagctacctatgaactgggcaaagaatttttccctatggaagctcagctgagtcgtctggtgggtcagcctctgtgggatgtgagtcgtagtagtacgggcaatttagtggaatggtttctgctgcgcaaagcctatgaacgtaatgaattagcacctaacaaaccggatgaacgcgaatatgaacgccgcctgcgtgaatcttatgcaggcggttttgttaaagaaccggaaaaaggcctgtgggaaaatattgtgtctctggattttcgtgcactggatccgagcatcatcattacacataatgtgtctccagataccctgaatcgcgaaggttgtcgtaattatgatgttgctccggaagtgggtcataaattttgcaaagattttccaggttttattccgagtctgctgaaacgcttactggatgaacgtcagaaaatcaaaaccaaaatgaaagcctcacaggatcctatcgaaaaaatcatgttagattatcgtcagcgtgccatcaaaattctggccaatagctattatggctattatggctatgctaaagctcgctggtattgcaaagaatgcgccgaatcagtgaccgcttggggtcgcgaatatatcgaatttgtgtggaaagaactggaagaaaaatttggctttaaagttctgtatatcgataccgatggcctgtatgcgaccattccgggtggtaaatctgaagaaattaagaagaaggccttagaatttgtggattatattaatgccaaactgccgggcctgctggaactggaatatgaaggcttttataaacgcggcttcttcgtgaccaagaaaaaatatgcactgatcgatgaagaaggtaaaatcattacacgcggcttagaaattgtgcgccgcgattggagcgaaattgccaaagaaacccaggcccgcgttctggaagccatcctgaaacatggtaatgtggaagaagcagttcgcattgttaaagaagtgacacagaaactgagcaaatatgaaatcccaccggaaaaactggccatctatgaacagattacacgtccactgcatgaatataaagccattggtccacatgttgcggttgccaaacgcttagccgctaaaggtgttaaaatcaaaccaggcatggttatcggctatattgttctgcgcggcgatggtccgatctctaatcgtgccatcttagcggaagaatatgatccacgcaaacataaatatgatgccgaatattatatcgaaaatcaggtgttaccagcagtgctgcgcattctggaaggctttggctatcgcaaagaagatttacgttggcagaaaaccaaacagacgggcctgacaagttggctgaatattaaaaaatcaggtacgggcggtggcggtgctacggttaaatttaaatataaaggcgaagaaaaagaagtggatattagtaaaatcaaaaaagtttggcgtgtgggcaaaatgatctctttcacttatgatgaaggcggcggcaaaaccggccgcggtgccgtgagcgaaaaagatgctcctaaagaactgttgcaaatgttagaaaaacagaaaaaaaattaa

SEQ ID NO: 346 - DNA, 2538 bp, Artificial Sequence
  Synthetic
atgatcttagatgcagattatatcacggaagaaggcaaaccagtgattcgcctgtttaaaaaagaaaatggcgaatttaaaatcgaacatgatcgcacctttcgcccgtatatctatgccctgctgaaagatgatagtaaaatcgaagaagttaagaaaatcacagcggaacgtcatggtaaaattgttcgcatcgttgatgcggaaaaagttgaaaagaaatttctgggtcgtcctattacagtttggcgtctgtattttgaacatcctcaggatgttccgacgattcgcgaaaaaatccgcgaacatagcgccgttgtggacatatttgaatatgatattccgtttgccaaacgctatctgattgataaaggtttaatccctatggaaggcgatgaagaactgaaactgttagcgtttgacatcgaaaccctgtatcatgaaggtgaagaatttggcaaaggcccgatcatcatgatctcttatgcagatgaagaagaagctaaagtgatcacttggaagaagatcgatttaccgtatgttgaagttgtgtctagtgaacgcgaaatgatcaaacgctttctgaaaatcattcgcgaaaaagatccggatattatcattacctataatggtgatagctttgatttaccttatttagccaaacgtgccgaaaaactgggcatcaaactgacgatcggtcgtgatggtagcgaacctaaaatgcagcgcatcggcgatatgacagcagttgaagttaaaggtcgcatccattttgatctgtatcatgttattcgtcgtacaatcaatttaccgacctataccctggaagcagtgtatgaagccatctttggtaaacctaaagaaaaagtgtatgcggatgaaattgctaaagcttgggaaacgggcgaaggcttagaacgcgttgctaaatatagcatggaagatgccaaagctacctatgaactgggcaaagaatttttccctatggaagctcagctgagtcgtctggtgggtcagcctctgtgggatgtgagtcgtagtagtacgggcaatttagtggaatggtttctgctgcgcaaagcctatgaacgtaatgaattagcacctaacaaaccggatgaacgcgaatatgaacgccgcctgcgtgaatcttatgcaggcggttttgttaaagaaccggaaaaaggcctgtgggaaaatattgtgtctctggattttcgtgcactgtttccgagcatcatcattacacataatgtgtctccagataccctgaatcgcgaaggttgtcgtaattatgatgttgctccggaagtgggtcataaattttgcaaagattttccaggttttattccgagtctgctgaaacgcttactggatgaacgtcagaaaatcaaaaccaaaatgaaagcctcacaggatcctatcgaaaaaatcatgttagattatcgtcagcgtgccatcaaaattctggccaatagctattatggctattatggctatgctaaagctcgctggtattgcaaagaatgcgccgaatcagtgaccgcttggggtcgcgaatatatcgaatttgtgtggaaagaactggaagaaaaatttggctttaaagttctgtatatcgataccgatggcctgtatgcgaccattccgggtggtaaatctgaagaaattaagaagaaggccttagaatttgtggattatattaatgccaaactgccgggcctgctggaactggaatatgaaggcttttataaacgcggcttcttcgtgaccaagaaaaaatatgcactgatcgatgaagaaggtaaaatcattacacgcggcttagaaattgtgcgccgcgattggagcgaaattgccaaagaaacccaggcccgcgttctggaagccatcctgaaacatggtaatgtggaagaagcagttcgcattgttaaagaagtgacacagaaactgagcaaatatgaaatcccaccggaaaaactggccatctatgaacagattacacgtccactgcatgaatataaagccattggtccacatgttgcggttgccaaacgcttagccgctaaaggtgttaaaatcaaaccaggcatggttatcggctatattgttctgcgcggcgatggtccgatctctaatcgtgccatcttagcggaagaatatgatccacgcaaacataaatatgatgccgaatattatatcgaaaatcaggtgttaccagcagtgctgcgcattctggaaggctttggctatcgcaaagaagatttacgttggcagaaaaccaaacagacgggcctgacaagttggctgaatattaaaaaatcaggtacgggcggtggcggtgctacggttaaatttaaatataaaggcgaagaaaaagaagtggatattagtaaaatcaaaaaagtttggcgtgtgggcaaaatgatctctttcacttatgatgaaggcggcggcaaaaccggccgcggtgccgtgagcgaaaaagatgctcctaaagaactgttgcaaatgttagaaaaacagaaaaaaaattaa

SEQ ID NO: 347 - DNA, 2538 bp, Artificial Sequence
  Synthetic
atgatcttagatgcagattatatcacggaagaaggcaaaccagtgattcgcctgtttaaaaaagaaaatggcgaatttaaaatcgaacatgatcgcacctttcgcccgtatatctatgccctgctgaaagatgatagtaaaatcgaagaagttaagaaaatcacagcggaacgtcatggtaaaattgttcgcatcgttgatgcggaaaaagttgaaaagaaatttctgggtcgtcctattacagtttggcgtctgtattttgaacatcctcaggatgttccgacgattcgcgaaaaaatccgcgaacatagcgccgttgtggacatatttgaatatgatattccgtttgccaaacgctatctgattgataaaggtttaatccctatggaaggcgatgaagaactgaaactgttagcgtttgacatcgaaaccctgtatcatgaaggtgaagaatttggcaaaggcccgatcatcatgatctcttatgcagatgaagaagaagctaaagtgatcacttggaagaagatcgatttaccgtatgttgaagttgtgtctagtgaacgcgaaatgatcaaacgctttctgaaaatcattcgcgaaaaagatccggatattatcattacctataatggtgatagctttgatttaccttatttagccaaacgtgccgaaaaactgggcatcaaactgacgatcggtcgtgatggtagcgaacctaaaatgcagcgcatcggcgatatgacagcagttgaagttaaaggtcgcatccattttgatctgtatcatgttattcgtcgtacaatcaatttaccgacctataccctggaagcagtgtatgaagccatctttggtaaacctaaagaaaaagtgtatgcggatgaaattgctaaagcttgggaaacgggcgaaggcttagaacgcgttgctaaatatagcatggaagatgccaaagctacctatgaactgggcaaagaatttttccctatggaagctcagctgagtcgtctggtgggtcagcctctgtgggatgtgagtcgtagtagtacgggcaatttagtggaatggtttctgctgcgcaaagcctatgaacgtaatgaattagcacctaacaaaccggatgaacgcgaatatgaacgccgcctgcgtgaatcttatgcaggcggttttgttaaagaaccggaaaaaggcctgtgggaaaatattgtgtctctggattttcgtgcactgggcccgagcatcatcattacacataatgtgtctccagataccctgaatcgcgaaggttgtcgtaattatgatgttgctccggaagtgggtcataaattttgcaaagattttccaggttttattccgagtctgctgaaacgcttactggatgaacgtcagaaaatcaaaaccaaaatgaaagcctcacaggatcctatcgaaaaaatcatgttagattatcgtcagcgtgccatcaaaattctggccaatagctattatggctattatggctatgctaaagctcgctggtattgcaaagaatgcgccgaatcagtgaccgcttggggtcgcgaatatatcgaatttgtgtggaaagaactggaagaaaaatttggctttaaagttctgtatatcgataccgatggcctgtatgcgaccattccgggtggtaaatctgaagaaattaagaagaaggccttagaatttgtggattatattaatgccaaactgccgggcctgctggaactggaatatgaaggcttttataaacgcggcttcttcgtgaccaagaaaaaatatgcactgatcgatgaagaaggtaaaatcattacacgcggcttagaaattgtgcgccgcgattggagcgaaattgccaaagaaacccaggcccgcgttctggaagccatcctgaaacatggtaatgtggaagaagcagttcgcattgttaaagaagtgacacagaaactgagcaaatatgaaatcccaccggaaaaactggccatctatgaacagattacacgtccactgcatgaatataaagccattggtccacatgttgcggttgccaaacgcttagccgctaaaggtgttaaaatcaaaccaggcatggttatcggctatattgttctgcgcggcgatggtccgatctctaatcgtgccatcttagcggaagaatatgatccacgcaaacataaatatgatgccgaatattatatcgaaaatcaggtgttaccagcagtgctgcgcattctggaaggctttggctatcgcaaagaagatttacgttggcagaaaaccaaacagacgggcctgacaagttggctgaatattaaaaaatcaggtacgggcggtggcggtgctacggttaaatttaaatataaaggcgaagaaaaagaagtggatattagtaaaatcaaaaaagtttggcgtgtgggcaaaatgatctctttcacttatgatgaaggcggcggcaaaaccggccgcggtgccgtgagcgaaaaagatgctcctaaagaactgttgcaaatgttagaaaaacagaaaaaaaattaa

SEQ ID NO: 348 - DNA, 2538 bp, Artificial Sequence
  Synthetic
atgatcttagatgcagattatatcacggaagaaggcaaaccagtgattcgcctgtttaaaaaagaaaatggcgaatttaaaatcgaacatgatcgcacctttcgcccgtatatctatgccctgctgaaagatgatagtaaaatcgaagaagttaagaaaatcacagcggaacgtcatggtaaaattgttcgcatcgttgatgcggaaaaagttgaaaagaaatttctgggtcgtcctattacagtttggcgtctgtattttgaacatcctcaggatgttccgacgattcgcgaaaaaatccgcgaacatagcgccgttgtggacatatttgaatatgatattccgtttgccaaacgctatctgattgataaaggtttaatccctatggaaggcgatgaagaactgaaactgttagcgtttgacatcgaaaccctgtatcatgaaggtgaagaatttggcaaaggcccgatcatcatgatctcttatgcagatgaagaagaagctaaagtgatcacttggaagaagatcgatttaccgtatgttgaagttgtgtctagtgaacgcgaaatgatcaaacgctttctgaaaatcattcgcgaaaaagatccggatattatcattacctataatggtgatagctttgatttaccttatttagccaaacgtgccgaaaaactgggcatcaaactgacgatcggtcgtgatggtagcgaacctaaaatgcagcgcatcggcgatatgacagcagttgaagttaaaggtcgcatccattttgatctgtatcatgttattcgtcgtacaatcaatttaccgacctataccctggaagcagtgtatgaagccatctttggtaaacctaaagaaaaagtgtatgcggatgaaattgctaaagcttgggaaacgggcgaaggcttagaacgcgttgctaaatatagcatggaagatgccaaagctacctatgaactgggcaaagaatttttccctatggaagctcagctgagtcgtctggtgggtcagcctctgtgggatgtgagtcgtagtagtacgggcaatttagtggaatggtttctgctgcgcaaagcctatgaacgtaatgaattagcacctaacaaaccggatgaacgcgaatatgaacgccgcctgcgtgaatcttatgcaggcggttttgttaaagaaccggaaaaaggcctgtgggaaaatattgtgtctctggattttcgtgcactgccgccgagcatcatcattacacataatgtgtctccagataccctgaatcgcgaaggttgtcgtaattatgatgttgctccggaagtgggtcataaattttgcaaagattttccaggttttattccgagtctgctgaaacgcttactggatgaacgtcagaaaatcaaaaccaaaatgaaagcctcacaggatcctatcgaaaaaatcatgttagattatcgtcagcgtgccatcaaaattctggccaatagctattatggctattatggctatgctaaagctcgctggtattgcaaagaatgcgccgaatcagtgaccgcttggggtcgcgaatatatcgaatttgtgtggaaagaactggaagaaaaatttggctttaaagttctgtatatcgataccgatggcctgtatgcgaccattccgggtggtaaatctgaagaaattaagaagaaggccttagaatttgtggattatattaatgccaaactgccgggcctgctggaactggaatatgaaggcttttataaacgcggcttcttcgtgaccaagaaaaaatatgcactgatcgatgaagaaggtaaaatcattacacgcggcttagaaattgtgcgccgcgattggagcgaaattgccaaagaaacccaggcccgcgttctggaagccatcctgaaacatggtaatgtggaagaagcagttcgcattgttaaagaagtgacacagaaactgagcaaatatgaaatcccaccggaaaaactggccatctatgaacagattacacgtccactgcatgaatataaagccattggtccacatgttgcggttgccaaacgcttagccgctaaaggtgttaaaatcaaaccaggcatggttatcggctatattgttctgcgcggcgatggtccgatctctaatcgtgccatcttagcggaagaatatgatccacgcaaacataaatatgatgccgaatattatatcgaaaatcaggtgttaccagcagtgctgcgcattctggaaggctttggctatcgcaaagaagatttacgttggcagaaaaccaaacagacgggcctgacaagttggctgaatattaaaaaatcaggtacgggcggtggcggtgctacggttaaatttaaatataaaggcgaagaaaaagaagtggatattagtaaaatcaaaaaagtttggcgtgtgggcaaaatgatctctttcacttatgatgaaggcggcggcaaaaccggccgcggtgccgtgagcgaaaaagatgctcctaaagaactgttgcaaatgttagaaaaacagaaaaaaaattaa

SEQ ID NO: 349 - DNA, 2538 bp, Artificial Sequence
  Synthetic
atgatcttagatgcagattatatcacggaagaaggcaaaccagtgattcgcctgtttaaaaaagaaaatggcgaatttaaaatcgaacatgatcgcacctttcgcccgtatatctatgccctgctgaaagatgatagtaaaatcgaagaagttaagaaaatcacagcggaacgtcatggtaaaattgttcgcatcgttgatgcggaaaaagttgaaaagaaatttctgggtcgtcctattacagtttggcgtctgtattttgaacatcctcaggatgttccgacgattcgcgaaaaaatccgcgaacatagcgccgttgtggacatatttgaatatgatattccgtttgccaaacgctatctgattgataaaggtttaatccctatggaaggcgatgaagaactgaaactgttagcgtttgacatcgaaaccctgtatcatgaaggtgaagaatttggcaaaggcccgatcatcatgatctcttatgcagatgaagaagaagctaaagtgatcacttggaagaagatcgatttaccgtatgttgaagttgtgtctagtgaacgcgaaatgatcaaacgctttctgaaaatcattcgcgaaaaagatccggatattatcattacctataatggtgatagctttgatttaccttatttagccaaacgtgccgaaaaactgggcatcaaactgacgatcggtcgtgatggtagcgaacctaaaatgcagcgcatcggcgatatgacagcagttgaagttaaaggtcgcatccattttgatctgtatcatgttattcgtcgtacaatcaatttaccgacctataccctggaagcagtgtatgaagccatctttggtaaacctaaagaaaaagtgtatgcggatgaaattgctaaagcttgggaaacgggcgaaggcttagaacgcgttgctaaatatagcatggaagatgccaaagctacctatgaactgggcaaagaatttttccctatggaagctcagctgagtcgtctggtgggtcagcctctgtgggatgtgagtcgtagtagtacgggcaatttagtggaatggtttctgctgcgcaaagcctatgaacgtaatgaattagcacctaacaaaccggatgaacgcgaatatgaacgccgcctgcgtgaatcttatgcaggcggttttgttaaagaaccggaaaaaggcctgtgggaaaatattgtgtctctggattttcgtgcactgcgcccgagcatcatcattacacataatgtgtctccagataccctgaatcgcgaaggttgtcgtaattatgatgttgctccggaagtgggtcataaattttgcaaagattttccaggttttattccgagtctgctgaaacgcttactggatgaacgtcagaaaatcaaaaccaaaatgaaagcctcacaggatcctatcgaaaaaatcatgttagattatcgtcagcgtgccatcaaaattctggccaatagctattatggctattatggctatgctaaagctcgctggtattgcaaagaatgcgccgaatcagtgaccgcttggggtcgcgaatatatcgaatttgtgtggaaagaactggaagaaaaatttggctttaaagttctgtatatcgataccgatggcctgtatgcgaccattccgggtggtaaatctgaagaaattaagaagaaggccttagaatttgtggattatattaatgccaaactgccgggcctgctggaactggaatatgaaggcttttataaacgcggcttcttcgtgaccaagaaaaaatatgcactgatcgatgaagaaggtaaaatcattacacgcggcttagaaattgtgcgccgcgattggagcgaaattgccaaagaaacccaggcccgcgttctggaagccatcctgaaacatggtaatgtggaagaagcagttcgcattgttaaagaagtgacacagaaactgagcaaatatgaaatcccaccggaaaaactggccatctatgaacagattacacgtccactgcatgaatataaagccattggtccacatgttgcggttgccaaacgcttagccgctaaaggtgttaaaatcaaaccaggcatggttatcggctatattgttctgcgcggcgatggtccgatctctaatcgtgccatcttagcggaagaatatgatccacgcaaacataaatatgatgccgaatattatatcgaaaatcaggtgttaccagcagtgctgcgcattctggaaggctttggctatcgcaaagaagatttacgttggcagaaaaccaaacagacgggcctgacaagttggctgaatattaaaaaatcaggtacgggcggtggcggtgctacggttaaatttaaatataaaggcgaagaaaaagaagtggatattagtaaaatcaaaaaagtttggcgtgtgggcaaaatgatctctttcacttatgatgaaggcggcggcaaaaccggccgcggtgccgtgagcgaaaaagatgctcctaaagaactgttgcaaatgttagaaaaacagaaaaaaaattaa

SEQ ID NO: 350 - DNA, 2538 bp, Artificial Sequence
  Synthetic
atgatcttagatgcagattatatcacggaagaaggcaaaccagtgattcgcctgtttaaaaaagaaaatggcgaatttaaaatcgaacatgatcgcacctttcgcccgtatatctatgccctgctgaaagatgatagtaaaatcgaagaagttaagaaaatcacagcggaacgtcatggtaaaattgttcgcatcgttgatgcggaaaaagttgaaaagaaatttctgggtcgtcctattacagtttggcgtctgtattttgaacatcctcaggatgttccgacgattcgcgaaaaaatccgcgaacatagcgccgttgtggacatatttgaatatgatattccgtttgccaaacgctatctgattgataaaggtttaatccctatggaaggcgatgaagaactgaaactgttagcgtttgacatcgaaaccctgtatcatgaaggtgaagaatttggcaaaggcccgatcatcatgatctcttatgcagatgaagaagaagctaaagtgatcacttggaagaagatcgatttaccgtatgttgaagttgtgtctagtgaacgcgaaatgatcaaacgctttctgaaaatcattcgcgaaaaagatccggatattatcattacctataatggtgatagctttgatttaccttatttagccaaacgtgccgaaaaactgggcatcaaactgacgatcggtcgtgatggtagcgaacctaaaatgcagcgcatcggcgatatgacagcagttgaagttaaaggtcgcatccattttgatctgtatcatgttattcgtcgtacaatcaatttaccgacctataccctggaagcagtgtatgaagccatctttggtaaacctaaagaaaaagtgtatgcggatgaaattgctaaagcttgggaaacgggcgaaggcttagaacgcgttgctaaatatagcatggaagatgccaaagctacctatgaactgggcaaagaatttttccctatggaagctcagctgagtcgtctggtgggtcagcctctgtgggatgtgagtcgtagtagtacgggcaatttagtggaatggtttctgctgcgcaaagcctatgaacgtaatgaattagcacctaacaaaccggatgaacgcgaatatgaacgccgcctgcgtgaatcttatgcaggcggttttgttaaagaaccggaaaaaggcctgtgggaaaatattgtgtctctggattttcgtgcactgagcccgagcatcatcattacacataatgtgtctccagataccctgaatcgcgaaggttgtcgtaattatgatgttgctccggaagtgggtcataaattttgcaaagattttccaggttttattccgagtctgctgaaacgcttactggatgaacgtcagaaaatcaaaaccaaaatgaaagcctcacaggatcctatcgaaaaaatcatgttagattatcgtcagcgtgccatcaaaattctggccaatagctattatggctattatggctatgctaaagctcgctggtattgcaaagaatgcgccgaatcagtgaccgcttggggtcgcgaatatatcgaatttgtgtggaaagaactggaagaaaaatttggctttaaagttctgtatatcgataccgatggcctgtatgcgaccattccgggtggtaaatctgaagaaattaagaagaaggccttagaatttgtggattatattaatgccaaactgccgggcctgctggaactggaatatgaaggcttttataaacgcggcttcttcgtgaccaagaaaaaatatgcactgatcgatgaagaaggtaaaatcattacacgcggcttagaaattgtgcgccgcgattggagcgaaattgccaaagaaacccaggcccgcgttctggaagccatcctgaaacatggtaatgtggaagaagcagttcgcattgttaaagaagtgacacagaaactgagcaaatatgaaatcccaccggaaaaactggccatctatgaacagattacacgtccactgcatgaatataaagccattggtccacatgttgcggttgccaaacgcttagccgctaaaggtgttaaaatcaaaccaggcatggttatcggctatattgttctgcgcggcgatggtccgatctctaatcgtgccatcttagcggaagaatatgatccacgcaaacataaatatgatgccgaatattatatcgaaaatcaggtgttaccagcagtgctgcgcattctggaaggctttggctatcgcaaagaagatttacgttggcagaaaaccaaacagacgggcctgacaagttggctgaatattaaaaaatcaggtacgggcggtggcggtgctacggttaaatttaaatataaaggcgaagaaaaagaagtggatattagtaaaatcaaaaaagtttggcgtgtgggcaaaatgatctctttcacttatgatgaaggcggcggcaaaaccggccgcggtgccgtgagcgaaaaagatgctcctaaagaactgttgcaaatgttagaaaaacagaaaaaaaattaa

SEQ ID NO: 351 - DNA, 2538 bp, Artificial Sequence
  Synthetic
atgatcttagatgcagattatatcacggaagaaggcaaaccagtgattcgcctgtttaaaaaagaaaatggcgaatttaaaatcgaacatgatcgcacctttcgcccgtatatctatgccctgctgaaagatgatagtaaaatcgaagaagttaagaaaatcacagcggaacgtcatggtaaaattgttcgcatcgttgatgcggaaaaagttgaaaagaaatttctgggtcgtcctattacagtttggcgtctgtattttgaacatcctcaggatgttccgacgattcgcgaaaaaatccgcgaacatagcgccgttgtggacatatttgaatatgatattccgtttgccaaacgctatctgattgataaaggtttaatccctatggaaggcgatgaagaactgaaactgttagcgtttgacatcgaaaccctgtatcatgaaggtgaagaatttggcaaaggcccgatcatcatgatctcttatgcagatgaagaagaagctaaagtgatcacttggaagaagatcgatttaccgtatgttgaagttgtgtctagtgaacgcgaaatgatcaaacgctttctgaaaatcattcgcgaaaaagatccggatattatcattacctataatggtgatagctttgatttaccttatttagccaaacgtgccgaaaaactgggcatcaaactgacgatcggtcgtgatggtagcgaacctaaaatgcagcgcatcggcgatatgacagcagttgaagttaaaggtcgcatccattttgatctgtatcatgttattcgtcgtacaatcaatttaccgacctataccctggaagcagtgtatgaagccatctttggtaaacctaaagaaaaagtgtatgcggatgaaattgctaaagcttgggaaacgggcgaaggcttagaacgcgttgctaaatatagcatggaagatgccaaagctacctatgaactgggcaaagaatttttccctatggaagctcagctgagtcgtctggtgggtcagcctctgtgggatgtgagtcgtagtagtacgggcaatttagtggaatggtttctgctgcgcaaagcctatgaacgtaatgaattagcacctaacaaaccggatgaacgcgaatatgaacgccgcctgcgtgaatcttatgcaggcggttttgttaaagaaccggaaaaaggcctgtgggaaaatattgtgtctctggattttcgtgcactgacaccgagcatcatcattacacataatgtgtctccagataccctgaatcgcgaaggttgtcgtaattatgatgttgctccggaagtgggtcataaattttgcaaagattttccaggttttattccgagtctgctgaaacgcttactggatgaacgtcagaaaatcaaaaccaaaatgaaagcctcacaggatcctatcgaaaaaatcatgttagattatcgtcagcgtgccatcaaaattctggccaatagctattatggctattatggctatgctaaagctcgctggtattgcaaagaatgcgccgaatcagtgaccgcttggggtcgcgaatatatcgaatttgtgtggaaagaactggaagaaaaatttggctttaaagttctgtatatcgataccgatggcctgtatgcgaccattccgggtggtaaatctgaagaaattaagaagaaggccttagaatttgtggattatattaatgccaaactgccgggcctgctggaactggaatatgaaggcttttataaacgcggcttcttcgtgaccaagaaaaaatatgcactgatcgatgaagaaggtaaaatcattacacgcggcttagaaattgtgcgccgcgattggagcgaaattgccaaagaaacccaggcccgcgttctggaagccatcctgaaacatggtaatgtggaagaagcagttcgcattgttaaagaagtgacacagaaactgagcaaatatgaaatcccaccggaaaaactggccatctatgaacagattacacgtccactgcatgaatataaagccattggtccacatgttgcggttgccaaacgcttagccgctaaaggtgttaaaatcaaaccaggcatggttatcggctatattgttctgcgcggcgatggtccgatctctaatcgtgccatcttagcggaagaatatgatccacgcaaacataaatatgatgccgaatattatatcgaaaatcaggtgttaccagcagtgctgcgcattctggaaggctttggctatcgcaaagaagatttacgttggcagaaaaccaaacagacgggcctgacaagttggctgaatattaaaaaatcaggtacgggcggtggcggtgctacggttaaatttaaatataaaggcgaagaaaaagaagtggatattagtaaaatcaaaaaagtttggcgtgtgggcaaaatgatctctttcacttatgatgaaggcggcggcaaaaccggccgcggtgccgtgagcgaaaaagatgctcctaaagaactgttgcaaatgttagaaaaacagaaaaaaaattaa

SEQ ID NO: 352 - DNA, 2328 bp, Artificial Sequence
  Synthetic
atgattctggatgctgattacattacggaagatggcaagccgattattcgcctgttcaaaaaggaaaacggtcgcttcaaggtggaatacgatcgtaactttcgcccgtatatttacgctctgctgaaagatgacagcgcgatcgatgacgtgcgtaaaattacctctgaacgccacggcaaggtggttcgtgtcatcgatgtggaaaaggttaaaaagaaattcctgggtcgcccgatcgaagtgtggaaactgtatttcgaacatccgcaggatgttccggctatgcgtgacaaaattcgcgaacacccggcggttatcgatatttttgaatatgacatcccgttcgctaaacgttacctgatcgataagggcctgattccgatggagggtaacgaagaactgacctttctggcggtggacattgaaacgctgtaccatgaaggcgaagaattcggcaaaggtccgattatcatgatcagctatgcagatgaagaaggtgctaaagtcatcacctggaagaaaattgacctgccgtatgtggaagtcgtggccaatgaacgtgaaatgattaagcgcctgatcaaagttattcgcgaaaaagatccggacgtcattatcacgtataacggcgataattttgacttcccgtacctgctgaagcgtgccgaaaaactgggcatgaagctgccgctgggtcgcgataacagtgaaccgaaaatgcagcgtctgggcgactccctggcagttgaaatcaaaggtcgcattcattttgacctgtttccggtgatccgtcgcaccattaatctgccgacctatacgctggaagcggtttacgaagccatcttcggcaagcaaaaggaaaaggtctacccgcacgaaatcgcagaagcttgggaaaccggcaaaggtctggaacgtgtcgccaagtatagtatggaagatgcaaaagtgacgtacgaactgggcaaggaatttttcccgatggaagcacagctggctcgcctggtgggccaaccgctgtgggacgtttcccgtagctctaccggtaatctggtggaatggtatctgctgcgtaaagcgtatgaacgcaacgaagtggcaccgaataaaccggatgaacgtgaatatcagcgtcgcctgcgcgaaagttatgcaggcggttacgtgaaagaaccggaaaaaggtctgtgggaaggcctggtttatctggattttcgtgcgctgtacccgagcattatcattacgcataacgtttctccggacaccctgaatcgtgaaggctgccgcgaatatgatattgcgccggaagtgggtcacaaattttgtaaagatatcccgggcttcattccgagcctgctgaaacgtctgctggaagaacgccagaaaatcaaaacgaaaatgaaagaaacccaagatccgatcgaaaaaattctgctggactaccgtcagcgcgcgatcaaaattctggccaacagttattacggttattacggctatgcaaaagctcgctggtactgcaaagaatgtgcagaatccgttaccgcttggggtcgtaaatacatcgaattcgtctggaaagaactggaagaaaaattcggtttcaaagttctgtacatcgatacggacggtctgtacgcaaccatcccgggcggtaaaccggaagaaattaagaaaaaagccctggaatttgtggattacattaatgcaaaactgccgggcctgctggaactggaatatgaaggtttctacgtgcgtggctttttcgttaccaagaaaaaatatgccgtcattgacgaagaaggtaaagtgatcacccgcggcctggaaattgttcgtcgcgattggagtgaaattgccaaagaaacccaggcaaaagttctggaagcaatcctgaaacatggtaatgtcgaagaagcagtgaaaattgtcaaggaagtgacggaaaaactgtcgaagtatgaaatcccgccggaaaaactggtgatctacgaacaaattacccgcccgctgcatgaatataaagcgattggcccgcacgtggcagttgctaaacgtctggcagcccgcggtgtcaaagtgcgtccgggcatggtgatcggttatattgttctgcgtggcgatggtccgatcagtaaacgcgcgattctggccgaagaatttgatccgcgcaaacacaagtacgacgccgaatattacatcgaaaaccaggtgctgccggctgttctgcgtattctggaagcgttcggctatcgtaaagaagatctgcgctggcagaaaaccaagcaaacgggtctgaccgcatggctgaatgtgaaaaagaaataa

SEQ ID NO: 353 - DNA, 2328 bp, Artificial Sequence
  Synthetic
atgattctggatgctgattacattacggaagatggcaagccgattattcgcctgttcaaaaaggaaaacggtcgcttcaaggtggaatacgatcgtaactttcgcccgtatatttacgctctgctgaaagatgacagcgcgatcgatgacgtgcgtaaaattacctctgaacgccacggcaaggtggttcgtgtcatcgatgtggaaaaggttaaaaagaaattcctgggtcgcccgatcgaagtgtggaaactgtatttcgaacatccgcaggatgttccggctatgcgtgacaaaattcgcgaacacccggcggttatcgatatttttgaatatgacatcccgttcgctaaacgttacctgatcgataagggcctgattccgatggagggtaacgaagaactgacctttctggcggtggacattgaaacgctgtaccatgaaggcgaagaattcggcaaaggtccgattatcatgatcagctatgcagatgaagaaggtgctaaagtcatcacctggaagaaaattgacctgccgtatgtggaagtcgtggccaatgaacgtgaaatgattaagcgcctgatcaaagttattcgcgaaaaagatccggacgtcattatcacgtataacggcgataattttgacttcccgtacctgctgaagcgtgccgaaaaactgggcatgaagctgccgctgggtcgcgataacagtgaaccgaaaatgcagcgtctgggcgactccctggcagttgaaatcaaaggtcgcattcattttgacctgtttccggtgatccgtcgcaccattaatctgccgacctatacgctggaagcggtttacgaagccatcttcggcaagcaaaaggaaaaggtctacccgcacgaaatcgcagaagcttgggaaaccggcaaaggtctggaacgtgtcgccaagtatagtatggaagatgcaaaagtgacgtacgaactgggcaaggaatttttcccgatggaagcacagctggctcgcctggtgggccaaccgctgtgggacgtttcccgtagctctaccggtaatctggtggaatggtatctgctgcgtaaagcgtatgaacgcaacgaactggcgccgaataaaccggatgaaaaggaactggcacgtcgccgtggcggttatgcaggcggttacgtcaaagaaccggaacgtggcctgtgggataatattgtgtatctggactttcgcagtctgtacccgtccattatcattacccataacgttagtccggacacgctgaatcgcgaaggctgcaaagaatatgatgtggccccggaagttggtcacaagttctgtaaagactttccgggcttcatcccgtccctgctgggtgatctgctggaagaacgccagaagattaagcgtaagatgaaagcaaccgttgatccgctggaaaagaaactgctggactatcgccaacgtgcgatcaaaattctggccaacagctattacggctattacggttatgcgaaagcccgctggtactgccgtgaatgtgcagaatctgtgaccgcttggggccgcgaatatattgaaaccacgatccgtgaaatcgaagaaaagttcggtttcaaggttctgtacgctgataccgacggctttttcgcgacgatcccgggtgcagatgctgaaaccgtgaaaaagaaagctaaggaattcctgaagtacatcaacgcgaaactgccgggcctgctggaactggaatatgaaggcttctacgttcgtggctttttcgtcacgaagaaaaagtacgcggttatcgacgaagaaggcaaaattaccacgcgcggtctggaaatcgtgcgccgtgattggagtgaaattgccaaagaaacccaggcacgcgttctggaagcaatcctgcgtcatggtgacgtcgaagaagccgttcgcattgtcaaagatgtgacggaaaagctgtcgaaatatgaagtcccgccggaaaaactggtgatccatgaacaaattacccgtgaactgaaggattacaaagcgacgggcccgcacgttgcaattgctaaacgcctggcagcccgtggcatcaagattcgtccgggtaccgttatcagctatattgtcctgaaaggctctggtcgcatcggtgatcgtgctattccgtttgatgaattcgacccgacgaaacaccgttacgatgccgaatattacatcgaaaatcaggtgctgccggccgttgaacgcattctgaaagcatttggctataagaaagaagaactgcgctaccagaaaacccgtcaagtgggcctgggtgcgtggctgaagctgaaaggtaagaaataa

SEQ ID NO: 354 - DNA, 2322 bp, Artificial Sequence
  Synthetic
atgattctggatgctgattacattacggaagatggcaagccgattattcgcctgttcaaaaaggaaaacggtcgcttcaaggtggaatacgatcgtaactttcgcccgtatatttacgctctgctgaaagatgacagcgcgatcgatgacgtgcgtaaaattacctctgaacgccacggcaaggtggttcgtgtcatcgatgtggaaaaggttaaaaagaaattcctgggtcgcccgatcgaagtgtggaaactgtatttcgaacatccgcaggatgttccggctatgcgtgacaaaattcgcgaacacccggcggttatcgatatttttgaatatgacatcccgttcgctaaacgttacctgatcgataagggcctgattccgatggagggtaacgaagaactgacctttctggcggtggacattgaaacgctgtaccatgaaggcgaagaattcggcaaaggtccgattatcatgatcagctatgcagatgaagaaggtgctaaagtcatcacctggaagaaaattgacctgccgtatgtggaagtcgtggccaatgaacgtgaaatgattaagcgcctgatcaaagttattcgcgaaaaagatccggacgtcattatcacgtataacggcgataattttgacttcccgtacctgctgaagcgtgccgaaaaactgggcatgaagctgccgctgggtcgcgataacagtgaaccgaaaatgcagcgtctgggcgactccctggcagttgaaatcaaaggtcgcattcattttgacctgtttccggtgatccgtcgcaccattaatctgccgacctatacgctggaagcggtttacgaagccatcttcggcaagcaaaaggaaaaggtctacccgcacgaaatcgcagaagcttgggaaaccggcaaaggtctggaacgtgtcgccaagtatagtatggaagatgcaaaagtgacgtacgaactgggcaaggaatttttcccgatggaagcacagctggctcgcctggtgggccaaccgctgtgggacgtttcccgtagctctaccggtaatctggtggaatggtatctgctgcgtaaagcgtatgaacgcaacgaactggcgccgaataaaccggatgaaaaggaactggcacgtcgccgtggcggttatgcaggcggttacgtcaaagaaccggaacgtggcctgtgggataatattgtgtatctggactttcgcagtctgtacccgtccattatcattacccataacgttagtccggacacgctgaatcgcgaaggctgcaaagaatatgatgtggccccggaagttggtcacaagttctgtaaagactttccgggcttcatcccgtccctgctgggtgatctgctggaagaacgccagaagattaagcgtaagatgaaagcaaccgttgatccgctggaaaagaaactgctggactatcgccaacgtgcgatcaaaattctggccaacagctattacggctattacggttatgcgaaagcccgctggtactgccgtgaatgtgcagaatctgtgaccgcttggggccgcgaatatattgaaaccacgatccgtgaaatcgaagaaaagttcggtttcaaggttctgtacgctgataccgacggctttttcgcgacgatcccgggtgcagatgctgaaaccgtgaaaaagaaagctaaggaattcctgaagtacatcaacgcgaaactgccgggcctgctggaactggaatatgaaggcttctacgttcgtggctttttcgtcacgaagaaaaagtacgcggttatcgacgaagaaggcaaaattaccacgcgcggtctggaaatcgtgcgccgtgattggagtgaaattgccaaagaaacccaggcacgtgtcctggaagcaatcctgaaacatggtgatgtggaagaagcggttcgcattgtcaaagaagtgacggaaaagctgtcgaaatatgaagttccgccggaaaaactggtcatccatgaacaaattacccgcgatctgcgtgactacaaagccacgggtccgcacgtggcagttgcaaaacgtctggcagcccgtggcgtgaagattcgtccgggtaccgtgatcagttatattgttctgaaaggctccggtcgcatcggtgaccgtgctattccgtttgatgaattcgacccgacgaaacaccgttacgatgccgaatattacatcgaaaatcaggtcctgccggccgtggaacgcattctgaaagcatttggttatcgcaaggaagatctgcgttaccagaagaccaaacaagtcggcctgggtgcgtggctgaaagtgaaaaagtaa

SEQ ID NO: 355 - DNA, 2328 bp, Artificial Sequence
  Synthetic
atgattctggatgctgattacattacggaagatggcaagccgattattcgcctgttcaaaaaggaaaacggtcgcttcaaggtggaatacgatcgtaactttcgcccgtatatttacgctctgctgaaagatgacagcgcgatcgatgacgtgcgtaaaattacctctgaacgccacggcaaggtggttcgtgtcatcgatgtggaaaaggttaaaaagaaattcctgggtcgcccgatcgaagtgtggaaactgtatttcgaacatccgcaggatgttccggctatgcgtgacaaaattcgcgaacacccggcggttatcgatatttttgaatatgacatcccgttcgctaaacgttacctgatcgataagggcctgattccgatggagggtaacgaagaactgacctttctggcggtggacattgaaacgctgtaccatgaaggcgaagaattcggcaaaggtccgattatcatgatcagctatgcagatgaagaaggtgctaaagtcatcacctggaagaaaattgacctgccgtatgtggaagtcgtggccaatgaacgtgaaatgattaagcgcctgatcaaagttattcgcgaaaaagatccggacgtcattatcacgtataacggcgataattttgacttcccgtacctgctgaagcgtgccgaaaaactgggcatgaagctgccgctgggtcgcgataacagtgaaccgaaaatgcagcgtctgggcgactccctggcagttgaaatcaaaggtcgcattcattttgacctgtttccggtgatccgtcgcaccattaatctgccgacctatacgctggaagcggtttacgaagccatcttcggcaagcaaaaggaaaaggtctacccgcacgaaatcgcagaagcttgggaaaccggcaaaggtctggaacgtgtcgccaagtatagtatggaagatgcaaaagtgacgtacgaactgggcaaggaatttttcccgatggaagcacagctggctcgcctggtgggccaaccgctgtgggacgtttcccgtagctctaccggtaatctggtggaatggtatctgctgcgtaaagcgtatgaacgcaacgaactggcgccgaataaaccggatgaaaaggaactggcacgtcgccgtggcggttatgcaggcggttacgtcaaagaaccggaacgtggcctgtgggataatattgtgtatctggactttcgcagtctgtacccgtccattatcattacccataacgttagtccggacacgctgaatcgcgaaggctgcaaagaatatgatgtggccccggaagttggtcacaagttctgtaaagactttccgggcttcatcccgtccctgctgggtgatctgctggaagaacgccagaagattaagcgtaagatgaaagcaaccgttgatccgctggaaaagaaactgctggactatcgccaacgtgcgatcaaaattctggccaacagctattacggctattacggttatgcgaaagcccgctggtactgccgtgaatgtgcagaatctgtgaccgcttggggccgcgaatatattgaaaccacgatccgtgaaatcgaagaaaagttcggtttcaaggttctgtacgctgataccgacggctttttcgcgacgatcccgggtgcagatgctgaaaccgtgaaaaagaaagctaaggaattcctgaagtacatcaacgcgaaactgccgggcctgctggaactggaatatgaaggcttctacgttcgtggctttttcgtcacgaagaaaaagtacgcggttatcgacgaagaaggcaaaattaccacgcgcggtctggaaatcgtgcgccgtgattggagtgaaattgccaaagaaacccaggcacgtgtgctggaagctctgctgaaagatggcaatgttgaagaagcggtttccattgtcaaagaagtgacggaaaagctgggtaaatatgaagtcccgccggaaaaactggtgatccatgaacaaattacccgcgaactgaaggattacaaagcgacgggcccgcacgttgctatcgcgaaacgtctggcagcgcgtggcgtgaagattcgtccgggtaccgttatcagctatattgtcctgaaaggctctggtcgtatcggtgaccgcgcgattccgtttgatgaattcgacccgacgaaacatcgctacgatgcagaatattacatcgaaaaccaggttctgccggctgtcgaacgtattctgaaagcgtttggctatcgtgccgaagatctgcgctaccagaaaacccgtcaagtgggcctgggtgtttggctgcaaccgaaaggtaagaaataa

SEQ ID NO: 356 - DNA, 2325 bp, Artificial Sequence
  Synthetic
atgattctggatgctgattacattacggaagatggcaagccgattattcgcctgttcaaaaaggaaaacggtcgcttcaaggtggaatacgatcgtaactttcgcccgtatatttacgctctgctgaaagatgacagcgcgatcgatgacgtgcgtaaaattacctctgaacgccacggcaaggtggttcgtgtcatcgatgtggaaaaggttaaaaagaaattcctgggtcgcccgatcgaagtgtggaaactgtatttcgaacatccgcaggatgttccggctatgcgtgacaaaattcgcgaacacccggcggttatcgatatttttgaatatgacatcccgttcgctaaacgttacctgatcgataagggcctgattccgatggagggtaacgaagaactgacctttctggcggtggacattgaaacgctgtaccatgaaggcgaagaattcggcaaaggtccgattatcatgatcagctatgcagatgaagaaggtgctaaagtcatcacctggaagaaaattgacctgccgtatgtggaagtcgtggccaatgaacgtgaaatgattaagcgcctgatcaaagttattcgcgaaaaagatccggacgtcattatcacgtataacggcgataattttgacttcccgtacctgctgaagcgtgccgaaaaactgggcatgaagctgccgctgggtcgcgataacagtgaaccgaaaatgcagcgtctgggcgactccctggcagttgaaatcaaaggtcgcattcattttgacctgtttccggtgatccgtcgcaccattaatctgccgacctatacgctggaagcggtttacgaagccatcttcggcaagcaaaaggaaaaggtctacccgcacgaaatcgcagaagcttgggaaaccggcaaaggtctggaacgtgtcgccaagtatagtatggaagatgcaaaagtgacgtacgaactgggcaaggaatttttcccgatggaagcacagctggctcgcctggtgggccaaccgctgtgggacgtttcccgtagctctaccggtaatctggtggaatggtatctgctgcgtaaagcgtatgaacgcaacgaactggcgccgaataaaccggatgaaaaggaactggcacgtcgccgtggcggttatgcaggcggttacgtcaaagaaccggaacgtggcctgtgggataatattgtgtatctggactttcgcagtctgtacccgtccattatcattacccataacgttagtccggacacgctgaatcgcgaaggctgcaaagaatatgatgtggccccggaagttggtcacaagttctgtaaagactttccgggcttcatcccgtccctgctgggtgatctgctggaagaacgccagaagattaagcgtaagatgaaagcaaccgttgatccgctggaaaagaaactgctggactatcgccaacgtgcgatcaaaattctggccaacagctattacggctattacggttatgcgaaagcccgctggtactgccgtgaatgtgcagaatctgtgaccgcttggggccgcgaatatattgaaaccacgatccgtgaaatcgaagaaaagttcggtttcaaggttctgtacgctgataccgacggctttttcgcgacgatcccgggtgcagatgctgaaaccgtgaaaaagaaagctaaggaattcctgaagtacatcaacgcgaaactgccgggcctgctggaactggaatatgaaggcttctacgttcgtggctttttcgtcacgaagaaaaagtacgcggttatcgacgaagaaggcaaaattaccacgcgcggtctggaaatcgtgcgccgtgattggagtgaaattgccaaagaaacccaggcaaaggttctggaagcaattctgaaacatggtaacgtcgaagaagcggtcaagatcgtgaaagaagttaccgaaaaactgtcgaattatgaaattccggtcgaaaagctggtgatctacgaacaaattacgcgcccgctgaacgaatataaagccattggcccgcacgtggcagttgctaaacgtctggcggccaagggtatcaagattaaaccgggcatggtgattggttatgttgtcctgcgcggcgatggtccgatcagcaaacgtgcgatcgccatcgaagaattcgatggcaaaaagcataagtacgacgcagaatactacatcgaaaatcaggttctgccggccgtcgaacgtatcctgaaagcattcggttataagcgtgaagatctgcgctggcagaagaccaaacaagtgggcctgggtgcgtggctgaaagttaaaaagtcttaa

SEQ ID NO: 357 - DNA, 2328 bp, Artificial Sequence
  Synthetic
atgattctggatgctgattacattacggaagatggcaagccgattattcgcctgttcaaaaaggaaaacggtcgcttcaaggtggaatacgatcgtaactttcgcccgtatatttacgctctgctgaaagatgacagcgcgatcgatgacgtgcgtaaaattacctctgaacgccacggcaaggtggttcgtgtcatcgatgtggaaaaggttaaaaagaaattcctgggtcgcccgatcgaagtgtggaaactgtatttcgaacatccgcaggatgttccggctatgcgtgacaaaattcgcgaacacccggcggttatcgatatttttgaatatgacatcccgttcgctaaacgttacctgatcgataagggcctgattccgatggagggtaacgaagaactgacctttctggcggtggacattgaaacgctgtaccatgaaggcgaagaattcggcaaaggtccgattatcatgatcagctatgcagatgaagaaggtgctaaagtcatcacctggaagaaaattgacctgccgtatgtggaagtcgtggccaatgaacgtgaaatgattaagcgcctgatcaaagttattcgcgaaaaagatccggacgtcattatcacgtataacggcgataattttgacttcccgtacctgctgaagcgtgccgaaaaactgggcatgaagctgccgctgggtcgcgataacagtgaaccgaaaatgcagcgtctgggcgactccctggcagttgaaatcaaaggtcgcattcattttgacctgtttccggtgatccgtcgcaccattaatctgccgacctatacgctggaagcggtttacgaagccatcttcggcaagcaaaaggaaaaggtctacccgcacgaaatcgcagaagcttgggaaaccggcaaaggtctggaacgtgtcgccaagtatagtatggaagatgcaaaagtgacgtacgaactgggcaaggaatttttcccgatggaagcacagctggctcgcctggtgggccaaccgctgtgggacgtttcccgtagctctaccggtaatctggtggaatggtatctgctgcgtaaagcgtatgaacgcaacgaactggcgccgaataaaccggatgaaaaggaactggcacgtcgccgtggcggttatgcaggcggttacgtcaaagaaccggaacgtggcctgtgggataatattgtgtatctggactttcgcagtctgtacccgtccattatcattacccataacgttagtccggacacgctgaatcgcgaaggctgcaaagaatatgatgtggccccggaagttggtcacaagttctgtaaagactttccgggcttcatcccgtccctgctgggtgatctgctggaagaacgccagaagattaagcgtaagatgaaagcaaccgttgatccgctggaaaagaaactgctggactatcgccaacgtgcgatcaaaattctggccaacagctattacggctattacggttatgcgaaagcccgctggtactgccgtgaatgtgcagaatctgtgaccgcttggggccgcgaatatattgaaaccacgatccgtgaaatcgaagaaaagttcggtttcaaggttctgtacgctgataccgacggctttttcgcgacgatcccgggtgcagatgctgaaaccgtgaaaaagaaagctaaggaattcctgaagtacatcaacgcgaaactgccgggcctgctggaactggaatatgaaggcttctacgttcgtggctttttcgtcacgaagaaaaagtacgcggttatcgacgaagaaggcaaaattaccacgcgcggtctggaaatcgtgcgccgtgattggagtgaaattgccaaagaaacccaggcacgtgttctggaagcactgctgaaagatggtaatgtcgaagaagcagtgagtattgttaaagaagtcacggaaaaactgtccaagtatgaagtcccgccggaaaaactggtgattcatgaacaaatcacccgcgaactgaaagattacaaggcgacgggcccgcacgtggcaattgctaaacgtctggcagcgcgtggcgttaagatccgtccgggtaccgttattagctatatcgtcctgaaaggctctggtcgtattggtgaccgcgccatcccgtttgatgaattcgacccggctaaacaccgctacgatgcggaatattacattgaaaatcaggtcctgccggctgtggaacgtatcctgaaagcgtttggctatcgtaaggaagatctgcgctaccagaaaacccgtcaagtgggcctgggtgcgtggctgaaaccgaagggtaaaaagtaa

SEQ ID NO: 358 - DNA, 2328 bp, Artificial Sequence
  Synthetic
atgattctggatgctgattacattacggaagatggcaagccgattattcgcctgttcaaaaaggaaaacggtcgcttcaaggtggaatacgatcgtaactttcgcccgtatatttacgctctgctgaaagatgacagcgcgatcgatgacgtgcgtaaaattacctctgaacgccacggcaaggtggttcgtgtcatcgatgtggaaaaggttaaaaagaaattcctgggtcgcccgatcgaagtgtggaaactgtatttcgaacatccgcaggatgttccggctatgcgtgacaaaattcgcgaacacccggcggttatcgatatttttgaatatgacatcccgttcgctaaacgttacctgatcgataagggcctgattccgatggagggtaacgaagaactgacctttctggcggtggacattgaaacgctgtaccatgaaggcgaagaattcggcaaaggtccgattatcatgatcagctatgcagatgaagaaggtgctaaagtcatcacctggaagaaaattgacctgccgtatgtggaagtcgtggccaatgaacgtgaaatgattaagcgcctgatcaaagttattcgcgaaaaagatccggacgtcattatcacgtataacggcgataattttgacttcccgtacctgctgaagcgtgccgaaaaactgggcatgaagctgccgctgggtcgcgataacagtgaaccgaaaatgcagcgtctgggcgactccctggcagttgaaatcaaaggtcgcattcattttgacctgtttccggtgatccgtcgcaccattaatctgccgacctatacgctggaagcggtttacgaagccatcttcggcaagcaaaaggaaaaggtctacccgcacgaaatcgcagaagcttgggaaaccggcaaaggtctggaacgtgtcgccaagtatagtatggaagatgcaaaagtgacgtacgaactgggcaaggaatttttcccgatggaagcacagctggctcgcctggtgggccaaccgctgtgggacgtttcccgtagctctaccggtaatctggtggaatggtatctgctgcgtaaagcgtatgaacgcaacgaactggcgccgaataaaccggatgaaaaggaactggcacgtcgccgtggcggttatgcaggcggttacgtcaaagaaccggaacgtggcctgtgggataatattgtgtatctggactttcgcagtctgtacccgtccattatcattacccataacgttagtccggacacgctgaatcgcgaaggctgcaaagaatatgatgtggccccggaagttggtcacaagttctgtaaagactttccgggcttcatcccgtccctgctgggtgatctgctggaagaacgccagaagattaagcgtaagatgaaagcaaccgttgatccgctggaaaagaaactgctggactatcgccaacgtgcgatcaaaattctggccaacagctattacggctattacggttatgcgaaagcccgctggtactgccgtgaatgtgcagaatctgtgaccgcttggggccgcgaatatattgaaaccacgatccgtgaaatcgaagaaaagttcggtttcaaggttctgtacgctgataccgacggctttttcgcgacgatcccgggtgcagatgctgaaaccgtgaaaaagaaagctaaggaattcctgaagtacatcaacgcgaaactgccgggcctgctggaactggaatatgaaggcttctacgttcgtggctttttcgtcacgaagaaaaagtacgcggttatcgacgaagaaggcaaaattaccacgcgcggtctggaaatcgtgcgccgtgattggagtgaaattgccaaagaaacccaggcacgcgtcctggaagcaatcctgaaagatggtgacgtggaagaagccgtccgtattgtgaaagaagttacggaaaaactgtccaaatatgaagttccgccggaaaaactggtcatccatgaacaaattacccgcgaactgaaagattacaaagcgacgggcccgcacgtcgcaatcgctaaacgtctggcggcgcgtggcgtgaaaattcgtccgggtaccgtgatctcatatattgttctgaaaggctcgggtcgtatcggtgaccgcgctattccgtttgatgaattcgacccgaaaaaacacaaatacgatgcggaatactacatcgaaaaccaggttctgccggccgtcgaacgtattctgcgcgcatttggctaccgtaaagaagatctgcgttatcaaaaaaccaaacaagtgggtctgggtgcgtggctgaaaccgaaaggtaaaaaataa

SEQ ID NO: 359 - DNA, 2325 bp, Artificial Sequence
  Synthetic
atgattctggatgctgattacattacggaagatggcaagccgattattcgcctgttcaaaaaggaaaacggtcgcttcaaggtggaatacgatcgtaactttcgcccgtatatttacgctctgctgaaagatgacagcgcgatcgatgacgtgcgtaaaattacctctgaacgccacggcaaggtggttcgtgtcatcgatgtggaaaaggttaaaaagaaattcctgggtcgcccgatcgaagtgtggaaactgtatttcgaacatccgcaggatgttccggctatgcgtgacaaaattcgcgaacacccggcggttatcgatatttttgaatatgacatcccgttcgctaaacgttacctgatcgataagggcctgattccgatggagggtaacgaagaactgacctttctggcggtggacattgaaacgctgtaccatgaaggcgaagaattcggcaaaggtccgattatcatgatcagctatgcagatgaagaaggtgctaaagtcatcacctggaagaaaattgacctgccgtatgtggaagtcgtggccaatgaacgtgaaatgattaagcgcctgatcaaagttattcgcgaaaaagatccggacgtcattatcacgtataacggcgataattttgacttcccgtacctgctgaagcgtgccgaaaaactgggcatgaagctgccgctgggtcgcgataacagtgaaccgaaaatgcagcgtctgggcgactccctggcagttgaaatcaaaggtcgcattcattttgacctgtttccggtgatccgtcgcaccattaatctgccgacctatacgctggaagcggtttacgaagccatcttcggcaagcaaaaggaaaaggtctacccgcacgaaatcgcagaagcttgggaaaccggcaaaggtctggaacgtgtcgccaagtatagtatggaagatgcaaaagtgacgtacgaactgggcaaggaatttttcccgatggaagcacagctggctcgcctggtgggccaaccgctgtgggacgtttcccgtagctctaccggtaatctggtggaatggtatctgctgcgtaaagcgtatgaacgcaacgaactggcgccgaataaaccggatgaaaaggaactggcacgtcgccgtggcggttatgcaggcggttacgtcaaagaaccggaacgtggcctgtgggataatattgtgtatctggactttcgcagtctgtacccgtccattatcattacccataacgttagtccggacacgctgaatcgcgaaggctgcaaagaatatgatgtggccccggaagttggtcacaagttctgtaaagactttccgggcttcatcccgtccctgctgggtgatctgctggaagaacgccagaagattaagcgtaagatgaaagcaaccgttgatccgctggaaaagaaactgctggactatcgccaacgtgcgatcaaaattctggccaacagctattacggctattacggttatgcgaaagcccgctggtactgccgtgaatgtgcagaatctgtgaccgcttggggccgcgaatatattgaaaccacgatccgtgaaatcgaagaaaagttcggtttcaaggttctgtacgctgataccgacggctttttcgcgacgatcccgggtgcagatgctgaaaccgtgaaaaagaaagctaaggaattcctgaagtacatcaacgcgaaactgccgggcctgctggaactggaatatgaaggcttctacgttcgtggctttttcgtcacgaagaaaaagtacgcggttatcgacgaagaaggcaaaattaccacgcgcggtctggaaatcgtgcgccgtgattggagtgaaattgccaaagaaacccaggcacgtgttctggaagcaattctgaaacatggtaacgtcgaagaagcggtcaaaatcgtgaaagaagttacggaaaaactgtctaactacgaaattccgccggaaaaactggccatctacgaacaaattacccgcccgctgcatgaatataaagcaatcggtccgcacgtcgcagtggcaaaacgtctggcagcacgcggcgttaaagtcaaaccgggtatggtcatcggctatattgtgctgcgtggtgatggcccgatcagcaaccgcgcaattctggctgaagaatacgatctgaaaaaacacaaatacgacgccgaatattacatcgaaaatcaggttctgccggctgtcctgcgtattctggaagcgtttggctatcgtaaagaagatctgcgctggcagaaaacccgtcaaacgggtctgacctcatggctgaatattaaaaaatcgtaa

SEQ ID NO: 360 - DNA, 2325 bp, Artificial Sequence
  Synthetic
atgattctggatgctgattacattacggaagatggcaagccgattattcgcctgttcaaaaaggaaaacggtcgcttcaaggtggaatacgatcgtaactttcgcccgtatatttacgctctgctgaaagatgacagcgcgatcgatgacgtgcgtaaaattacctctgaacgccacggcaaggtggttcgtgtcatcgatgtggaaaaggttaaaaagaaattcctgggtcgcccgatcgaagtgtggaaactgtatttcgaacatccgcaggatgttccggctatgcgtgacaaaattcgcgaacacccggcggttatcgatatttttgaatatgacatcccgttcgctaaacgttacctgatcgataagggcctgattccgatggagggtaacgaagaactgacctttctggcggtggacattgaaacgctgtaccatgaaggcgaagaattcggcaaaggtccgattatcatgatcagctatgcagatgaagaaggtgctaaagtcatcacctggaagaaaattgacctgccgtatgtggaagtcgtggccaatgaacgtgaaatgattaagcgcctgatcaaagttattcgcgaaaaagatccggacgtcattatcacgtataacggcgataattttgacttcccgtacctgctgaagcgtgccgaaaaactgggcatgaagctgccgctgggtcgcgataacagtgaaccgaaaatgcagcgtctgggcgactccctggcagttgaaatcaaaggtcgcattcattttgacctgtttccggtgatccgtcgcaccattaatctgccgacctatacgctggaagcggtttacgaagccatcttcggcaagcaaaaggaaaaggtctacccgcacgaaatcgcagaagcttgggaaaccggcaaaggtctggaacgtgtcgccaagtatagtatggaagatgcaaaagtgacgtacgaactgggcaaggaatttttcccgatggaagcacagctggctcgcctggtgggccaaccgctgtgggacgtttcccgtagctctaccggtaatctggtggaatggtatctgctgcgtaaagcgtatgaacgcaacgaactggcgccgaataaaccggatgaaaaggaactggcacgtcgccgtggcggttatgcaggcggttacgtcaaagaaccggaacgtggcctgtgggataatattgtgtatctggactttcgcagtctgtacccgtccattatcattacccataacgttagtccggacacgctgaatcgcgaaggctgcaaagaatatgatgtggccccggaagttggtcacaagttctgtaaagactttccgggcttcatcccgtccctgctgggtgatctgctggaagaacgccagaagattaagcgtaagatgaaagcaaccgttgatccgctggaaaagaaactgctggactatcgccaacgtgcgatcaaaattctggccaacagctattacggctattacggttatgcgaaagcccgctggtactgccgtgaatgtgcagaatctgtgaccgcttggggccgcgaatatattgaaaccacgatccgtgaaatcgaagaaaagttcggtttcaaggttctgtacgctgataccgacggctttttcgcgacgatcccgggtgcagatgctgaaaccgtgaaaaagaaagctaaggaattcctgaagtacatcaacgcgaaactgccgggcctgctggaactggaatatgaaggcttctacgttcgtggctttttcgtcacgaagaaaaagtacgcggttatcgacgaagaaggcaaaattaccacgcgcggtctggaaatcgtgcgccgtgattggagtgaaattgccaaagaaacccaggcaaaagttctggaagcaatcctgaaacatggtaatgtcgaagaagcagtgaaaattgtcaaggaagtgacggaaaaactgtcgaagtatgaaatcccgccggaaaaactggtgatctacgaacaaattacccgcccgctgcatgaatataaagcgattggcccgcacgtggcagttgctaaacgtctggcagcccgcggtgtcaaagtgcgtccgggcatggtgatcggttatattgttctgcgtggcgatggtccgatcagtaaacgcgcgattctggccgaagaatttgatccgcgcaaacacaagtacgacgccgaatattacatcgaaaaccaggtgctgccggctgttctgcgtattctggaagcgttcggctatcgtaaagaagatctgcgctggcagaaaaccaagcaaacgggtctgaccgcatggctgaatgtgaaaaagaaataa

SEQ ID NO: 361 - DNA, 2328 bp, Artificial Sequence
  Synthetic
atgattctggatgctgattacattacggaagatggcaagccgattattcgcctgttcaaaaaggaaaacggtcgcttcaaggtggaatacgatcgtaactttcgcccgtatatttacgctctgctgaaagatgacagcgcgatcgatgacgtgcgtaaaattacctctgaacgccacggcaaggtggttcgtgtcatcgatgtggaaaaggttaaaaagaaattcctgggtcgcccgatcgaagtgtggaaactgtatttcgaacatccgcaggatgttccggctatgcgtgacaaaattcgcgaacacccggcggttatcgatatttttgaatatgacatcccgttcgctaaacgttacctgatcgataagggcctgattccgatggagggtaacgaagaactgacctttctggcggtggacattgaaacgctgtaccatgaaggcgaagaattcggcaaaggtccgattatcatgatcagctatgcagatgaagaaggtgctaaagtcatcacctggaagaaaattgacctgccgtatgtggaagtcgtggccaatgaacgtgaaatgattaagcgcctgatcaaagttattcgcgaaaaagatccggacgtcattatcacgtataacggcgataattttgacttcccgtacctgctgaagcgtgccgaaaaactgggcatgaagctgccgctgggtcgcgataacagtgaaccgaaaatgcagcgtctgggcgactccctggcagttgaaatcaaaggtcgcattcattttgacctgtttccggtgatccgtcgcaccattaatctgccgacctatacgctggaagcggtttacgaagccatcttcggcaagcaaaaggaaaaggtctacccgcacgaaatcgcagaagcttgggaaaccggcaaaggtctggaacgtgtcgccaagtatagtatggaagatgcaaaagtgacgtacgaactgggcaaggaatttttcccgatggaagcacagctggctcgcctggtgggccaaccgctgtgggacgtttcccgtagctctaccggtaatctggtggaatggtatctgctgcgtaaagcgtatgaacgcaacgaaattgcgccgaataaaccggatgaacgtgaactggcacgtcgccgtggcggttatgcaggcggttacgttaaagaaccggaacgcggcctgtgggataatatcgtctatctggactttatgagtctgtacccgtccattatcattacccataacgttagtccggacacgttcaatcgtgaaggctgcaaagaatatgataccgccccgcaggttggtcacaagttttgtaaagacgtccaaggcttcattccgagtctgctgggtgccctgctggatgaacgccagaaaatcaagaaacgtatgaaggcatccattgatccgctggaaaagaaactgctggactatcgccaaaaggcgatcaaaattctggccaactcatattacggctattacggttatgcacgcgctcgttggtactgcaaagaatgtgcagaatcggtgaccgcttggggccgtgattatattgaaaccacgatccacgaaattgaagaacgctttggtttcaaagttctgtacgctgataccgacggctttttcgcgacgatcccgggtgcggatgccgaaaccgtgaagaaaaaggctaaggaattcctgaagtacatcaacgcgaaactgccgggcctgctggaactggaatatgaaggcttctacgtccgtggctttttcgtgaccaaaaagaaatacgcggttatcgacgaagaaggcaaaattaccacgcgcggtctggaaatcgtgcgccgtgattggagtgaaattgccaaagaaacccaggcacgcgttctggaagcaatcctgcgtcatggtgacgtcgaagaagccgttcgcattgtcaaagatgtgacggaaaagctgtcgaaatatgaagtcccgccggaaaaactggtgatccatgaacaaattacccgtgaactgaaggattacaaagcgacgggcccgcacgttgcaattgctaaacgcctggcagcccgtggcatcaagattcgtccgggtaccgttatcagctatattgtcctgaaaggctctggtcgcatcggtgatcgtgctattccgtttgatgaattcgacccgacgaaacaccgttacgatgccgaatattacatcgaaaatcaggtgctgccggccgttgaacgcattctgaaagcatttggctataagaaagaagaactgcgctaccagaaaacccgtcaagtgggcctgggtgcgtggctgaagctgaaaggtaagaaataa

SEQ ID NO: 362 - DNA, 2322 bp, Artificial Sequence
  Synthetic
atgattctggatgctgattacattacggaagatggcaagccgattattcgcctgttcaaaaaggaaaacggtcgcttcaaggtggaatacgatcgtaactttcgcccgtatatttacgctctgctgaaagatgacagcgcgatcgatgacgtgcgtaaaattacctctgaacgccacggcaaggtggttcgtgtcatcgatgtggaaaaggttaaaaagaaattcctgggtcgcccgatcgaagtgtggaaactgtatttcgaacatccgcaggatgttccggctatgcgtgacaaaattcgcgaacacccggcggttatcgatatttttgaatatgacatcccgttcgctaaacgttacctgatcgataagggcctgattccgatggagggtaacgaagaactgacctttctggcggtggacattgaaacgctgtaccatgaaggcgaagaattcggcaaaggtccgattatcatgatcagctatgcagatgaagaaggtgctaaagtcatcacctggaagaaaattgacctgccgtatgtggaagtcgtggccaatgaacgtgaaatgattaagcgcctgatcaaagttattcgcgaaaaagatccggacgtcattatcacgtataacggcgataattttgacttcccgtacctgctgaagcgtgccgaaaaactgggcatgaagctgccgctgggtcgcgataacagtgaaccgaaaatgcagcgtctgggcgactccctggcagttgaaatcaaaggtcgcattcattttgacctgtttccggtgatccgtcgcaccattaatctgccgacctatacgctggaagcggtttacgaagccatcttcggcaagcaaaaggaaaaggtctacccgcacgaaatcgcagaagcttgggaaaccggcaaaggtctggaacgtgtcgccaagtatagtatggaagatgcaaaagtgacgtacgaactgggcaaggaatttttcccgatggaagcacagctggctcgcctggtgggccaaccgctgtgggacgtttcccgtagctctaccggtaatctggtggaatggtatctgctgcgtaaagcgtatgaacgcaacgaaattgcgccgaataaaccggatgaacgtgaactggcacgtcgccgtggcggttatgcaggcggttacgttaaagaaccggaacgcggcctgtgggataatatcgtctatctggactttatgagtctgtacccgtccattatcattacccataacgttagtccggacacgttcaatcgtgaaggctgcaaagaatatgataccgccccgcaggttggtcacaagttttgtaaagacgtccaaggcttcattccgagtctgctgggtgccctgctggatgaacgccagaaaatcaagaaacgtatgaaggcatccattgatccgctggaaaagaaactgctggactatcgccaaaaggcgatcaaaattctggccaactcatattacggctattacggttatgcacgcgctcgttggtactgcaaagaatgtgcagaatcggtgaccgcttggggccgtgattatattgaaaccacgatccacgaaattgaagaacgctttggtttcaaagttctgtacgctgataccgacggctttttcgcgacgatcccgggtgcggatgccgaaaccgtgaagaaaaaggctaaggaattcctgaagtacatcaacgcgaaactgccgggcctgctggaactggaatatgaaggcttctacgtccgtggctttttcgtgaccaaaaagaaatacgcggttatcgacgaagaaggcaaaattaccacgcgcggtctggaaatcgtgcgccgtgattggagtgaaattgccaaagaaacccaggcacgtgtcctggaagcaatcctgaaacatggtgatgtggaagaagcggttcgcattgtcaaagaagtgacggaaaagctgtcgaaatatgaagttccgccggaaaaactggtcatccatgaacaaattacccgcgatctgcgtgactacaaagccacgggtccgcacgtggcagttgcaaaacgtctggcagcccgtggcgtgaagattcgtccgggtaccgtgatcagttatattgttctgaaaggctccggtcgcatcggtgaccgtgctattccgtttgatgaattcgacccgacgaaacaccgttacgatgccgaatattacatcgaaaatcaggtcctgccggccgtggaacgcattctgaaagcatttggttatcgcaaggaagatctgcgttaccagaagaccaaacaagtcggcctgggtgcgtggctgaaagtgaaaaagtaa

SEQ ID NO: 363 - DNA, 2328 bp, Artificial Sequence
  Synthetic
atgattctggatgctgattacattacggaagatggcaagccgattattcgcctgttcaaaaaggaaaacggtcgcttcaaggtggaatacgatcgtaactttcgcccgtatatttacgctctgctgaaagatgacagcgcgatcgatgacgtgcgtaaaattacctctgaacgccacggcaaggtggttcgtgtcatcgatgtggaaaaggttaaaaagaaattcctgggtcgcccgatcgaagtgtggaaactgtatttcgaacatccgcaggatgttccggctatgcgtgacaaaattcgcgaacacccggcggttatcgatatttttgaatatgacatcccgttcgctaaacgttacctgatcgataagggcctgattccgatggagggtaacgaagaactgacctttctggcggtggacattgaaacgctgtaccatgaaggcgaagaattcggcaaaggtccgattatcatgatcagctatgcagatgaagaaggtgctaaagtcatcacctggaagaaaattgacctgccgtatgtggaagtcgtggccaatgaacgtgaaatgattaagcgcctgatcaaagttattcgcgaaaaagatccggacgtcattatcacgtataacggcgataattttgacttcccgtacctgctgaagcgtgccgaaaaactgggcatgaagctgccgctgggtcgcgataacagtgaaccgaaaatgcagcgtctgggcgactccctggcagttgaaatcaaaggtcgcattcattttgacctgtttccggtgatccgtcgcaccattaatctgccgacctatacgctggaagcggtttacgaagccatcttcggcaagcaaaaggaaaaggtctacccgcacgaaatcgcagaagcttgggaaaccggcaaaggtctggaacgtgtcgccaagtatagtatggaagatgcaaaagtgacgtacgaactgggcaaggaatttttcccgatggaagcacagctggctcgcctggtgggccaaccgctgtgggacgtttcccgtagctctaccggtaatctggtggaatggtatctgctgcgtaaagcgtatgaacgcaacgaaattgcgccgaataaaccggatgaacgtgaactggcacgtcgccgtggcggttatgcaggcggttacgttaaagaaccggaacgcggcctgtgggataatatcgtctatctggactttatgagtctgtacccgtccattatcattacccataacgttagtccggacacgttcaatcgtgaaggctgcaaagaatatgataccgccccgcaggttggtcacaagttttgtaaagacgtccaaggcttcattccgagtctgctgggtgccctgctggatgaacgccagaaaatcaagaaacgtatgaaggcatccattgatccgctggaaaagaaactgctggactatcgccaaaaggcgatcaaaattctggccaactcatattacggctattacggttatgcacgcgctcgttggtactgcaaagaatgtgcagaatcggtgaccgcttggggccgtgattatattgaaaccacgatccacgaaattgaagaacgctttggtttcaaagttctgtacgctgataccgacggctttttcgcgacgatcccgggtgcggatgccgaaaccgtgaagaaaaaggctaaggaattcctgaagtacatcaacgcgaaactgccgggcctgctggaactggaatatgaaggcttctacgtccgtggctttttcgtgaccaaaaagaaatacgcggttatcgacgaagaaggcaaaattaccacgcgcggtctggaaatcgtgcgccgtgattggagtgaaattgccaaagaaacccaggcacgtgtgctggaagctctgctgaaagatggcaatgttgaagaagcggtttccattgtcaaagaagtgacggaaaagctgggtaaatatgaagtcccgccggaaaaactggtgatccatgaacaaattacccgcgaactgaaggattacaaagcgacgggcccgcacgttgctatcgcgaaacgtctggcagcgcgtggcgtgaagattcgtccgggtaccgttatcagctatattgtcctgaaaggctctggtcgtatcggtgaccgcgcgattccgtttgatgaattcgacccgacgaaacatcgctacgatgcagaatattacatcgaaaaccaggttctgccggctgtcgaacgtattctgaaagcgtttggctatcgtgccgaagatctgcgctaccagaaaacccgtcaagtgggcctgggtgtttggctgcaaccgaaaggtaagaaataa

SEQ ID NO: 364 - DNA, 2325 bp, Artificial Sequence
  Synthetic
atgattctggatgctgattacattacggaagatggcaagccgattattcgcctgttcaaaaaggaaaacggtcgcttcaaggtggaatacgatcgtaactttcgcccgtatatttacgctctgctgaaagatgacagcgcgatcgatgacgtgcgtaaaattacctctgaacgccacggcaaggtggttcgtgtcatcgatgtggaaaaggttaaaaagaaattcctgggtcgcccgatcgaagtgtggaaactgtatttcgaacatccgcaggatgttccggctatgcgtgacaaaattcgcgaacacccggcggttatcgatatttttgaatatgacatcccgttcgctaaacgttacctgatcgataagggcctgattccgatggagggtaacgaagaactgacctttctggcggtggacattgaaacgctgtaccatgaaggcgaagaattcggcaaaggtccgattatcatgatcagctatgcagatgaagaaggtgctaaagtcatcacctggaagaaaattgacctgccgtatgtggaagtcgtggccaatgaacgtgaaatgattaagcgcctgatcaaagttattcgcgaaaaagatccggacgtcattatcacgtataacggcgataattttgacttcccgtacctgctgaagcgtgccgaaaaactgggcatgaagctgccgctgggtcgcgataacagtgaaccgaaaatgcagcgtctgggcgactccctggcagttgaaatcaaaggtcgcattcattttgacctgtttccggtgatccgtcgcaccattaatctgccgacctatacgctggaagcggtttacgaagccatcttcggcaagcaaaaggaaaaggtctacccgcacgaaatcgcagaagcttgggaaaccggcaaaggtctggaacgtgtcgccaagtatagtatggaagatgcaaaagtgacgtacgaactgggcaaggaatttttcccgatggaagcacagctggctcgcctggtgggccaaccgctgtgggacgtttcccgtagctctaccggtaatctggtggaatggtatctgctgcgtaaagcgtatgaacgcaacgaaattgcgccgaataaaccggatgaacgtgaactggcacgtcgccgtggcggttatgcaggcggttacgttaaagaaccggaacgcggcctgtgggataatatcgtctatctggactttatgagtctgtacccgtccattatcattacccataacgttagtccggacacgttcaatcgtgaaggctgcaaagaatatgataccgccccgcaggttggtcacaagttttgtaaagacgtccaaggcttcattccgagtctgctgggtgccctgctggatgaacgccagaaaatcaagaaacgtatgaaggcatccattgatccgctggaaaagaaactgctggactatcgccaaaaggcgatcaaaattctggccaactcatattacggctattacggttatgcacgcgctcgttggtactgcaaagaatgtgcagaatcggtgaccgcttggggccgtgattatattgaaaccacgatccacgaaattgaagaacgctttggtttcaaagttctgtacgctgataccgacggctttttcgcgacgatcccgggtgcggatgccgaaaccgtgaagaaaaaggctaaggaattcctgaagtacatcaacgcgaaactgccgggcctgctggaactggaatatgaaggcttctacgtccgtggctttttcgtgaccaaaaagaaatacgcggttatcgacgaagaaggcaaaattaccacgcgcggtctggaaatcgtgcgccgtgattggagtgaaattgccaaagaaacccaggcaaaggttctggaagcaattctgaaacatggtaacgtcgaagaagcggtcaagatcgtgaaagaagttaccgaaaaactgtcgaattatgaaattccggtcgaaaagctggtgatctacgaacaaattacgcgcccgctgaacgaatataaagccattggcccgcacgtggcagttgctaaacgtctggcggccaagggtatcaagattaaaccgggcatggtgattggttatgttgtcctgcgcggcgatggtccgatcagcaaacgtgcgatcgccatcgaagaattcgatggcaaaaagcataagtacgacgcagaatactacatcgaaaatcaggttctgccggccgtcgaacgtatcctgaaagcattcggttataagcgtgaagatctgcgctggcagaagaccaaacaagtgggcctgggtgcgtggctgaaagttaaaaagtcttaa

SEQ ID NO: 365 - DNA, 2328 bp, Artificial Sequence
  Synthetic
atgattctggatgctgattacattacggaagatggcaagccgattattcgcctgttcaaaaaggaaaacggtcgcttcaaggtggaatacgatcgtaactttcgcccgtatatttacgctctgctgaaagatgacagcgcgatcgatgacgtgcgtaaaattacctctgaacgccacggcaaggtggttcgtgtcatcgatgtggaaaaggttaaaaagaaattcctgggtcgcccgatcgaagtgtggaaactgtatttcgaacatccgcaggatgttccggctatgcgtgacaaaattcgcgaacacccggcggttatcgatatttttgaatatgacatcccgttcgctaaacgttacctgatcgataagggcctgattccgatggagggtaacgaagaactgacctttctggcggtggacattgaaacgctgtaccatgaaggcgaagaattcggcaaaggtccgattatcatgatcagctatgcagatgaagaaggtgctaaagtcatcacctggaagaaaattgacctgccgtatgtggaagtcgtggccaatgaacgtgaaatgattaagcgcctgatcaaagttattcgcgaaaaagatccggacgtcattatcacgtataacggcgataattttgacttcccgtacctgctgaagcgtgccgaaaaactgggcatgaagctgccgctgggtcgcgataacagtgaaccgaaaatgcagcgtctgggcgactccctggcagttgaaatcaaaggtcgcattcattttgacctgtttccggtgatccgtcgcaccattaatctgccgacctatacgctggaagcggtttacgaagccatcttcggcaagcaaaaggaaaaggtctacccgcacgaaatcgcagaagcttgggaaaccggcaaaggtctggaacgtgtcgccaagtatagtatggaagatgcaaaagtgacgtacgaactgggcaaggaatttttcccgatggaagcacagctggctcgcctggtgggccaaccgctgtgggacgtttcccgtagctctaccggtaatctggtggaatggtatctgctgcgtaaagcgtatgaacgcaacgaaattgcgccgaataaaccggatgaacgtgaactggcacgtcgccgtggcggttatgcaggcggttacgttaaagaaccggaacgcggcctgtgggataatatcgtctatctggactttatgagtctgtacccgtccattatcattacccataacgttagtccggacacgttcaatcgtgaaggctgcaaagaatatgataccgccccgcaggttggtcacaagttttgtaaagacgtccaaggcttcattccgagtctgctgggtgccctgctggatgaacgccagaaaatcaagaaacgtatgaaggcatccattgatccgctggaaaagaaactgctggactatcgccaaaaggcgatcaaaattctggccaactcatattacggctattacggttatgcacgcgctcgttggtactgcaaagaatgtgcagaatcggtgaccgcttggggccgtgattatattgaaaccacgatccacgaaattgaagaacgctttggtttcaaagttctgtacgctgataccgacggctttttcgcgacgatcccgggtgcggatgccgaaaccgtgaagaaaaaggctaaggaattcctgaagtacatcaacgcgaaactgccgggcctgctggaactggaatatgaaggcttctacgtccgtggctttttcgtgaccaaaaagaaatacgcggttatcgacgaagaaggcaaaattaccacgcgcggtctggaaatcgtgcgccgtgattggagtgaaattgccaaagaaacccaggcacgtgttctggaagcactgctgaaagatggtaatgtcgaagaagcagtgagtattgttaaagaagtcacggaaaaactgtccaagtatgaagtcccgccggaaaaactggtgattcatgaacaaatcacccgcgaactgaaagattacaaggcgacgggcccgcacgtggcaattgctaaacgtctggcagcgcgtggcgttaagatccgtccgggtaccgttattagctatatcgtcctgaaaggctctggtcgtattggtgaccgcgccatcccgtttgatgaattcgacccggctaaacaccgctacgatgcggaatattacattgaaaatcaggtcctgccggctgtggaacgtatcctgaaagcgtttggctatcgtaaggaagatctgcgctaccagaaaacccgtcaagtgggcctgggtgcgtggctgaaaccgaagggtaaaaagtaa

SEQ ID NO: 366 - DNA, 2328 bp, Artificial Sequence
  Synthetic
atgattctggatgctgattacattacggaagatggcaagccgattattcgcctgttcaaaaaggaaaacggtcgcttcaaggtggaatacgatcgtaactttcgcccgtatatttacgctctgctgaaagatgacagcgcgatcgatgacgtgcgtaaaattacctctgaacgccacggcaaggtggttcgtgtcatcgatgtggaaaaggttaaaaagaaattcctgggtcgcccgatcgaagtgtggaaactgtatttcgaacatccgcaggatgttccggctatgcgtgacaaaattcgcgaacacccggcggttatcgatatttttgaatatgacatcccgttcgctaaacgttacctgatcgataagggcctgattccgatggagggtaacgaagaactgacctttctggcggtggacattgaaacgctgtaccatgaaggcgaagaattcggcaaaggtccgattatcatgatcagctatgcagatgaagaaggtgctaaagtcatcacctggaagaaaattgacctgccgtatgtggaagtcgtggccaatgaacgtgaaatgattaagcgcctgatcaaagttattcgcgaaaaagatccggacgtcattatcacgtataacggcgataattttgacttcccgtacctgctgaagcgtgccgaaaaactgggcatgaagctgccgctgggtcgcgataacagtgaaccgaaaatgcagcgtctgggcgactccctggcagttgaaatcaaaggtcgcattcattttgacctgtttccggtgatccgtcgcaccattaatctgccgacctatacgctggaagcggtttacgaagccatcttcggcaagcaaaaggaaaaggtctacccgcacgaaatcgcagaagcttgggaaaccggcaaaggtctggaacgtgtcgccaagtatagtatggaagatgcaaaagtgacgtacgaactgggcaaggaatttttcccgatggaagcacagctggctcgcctggtgggccaaccgctgtgggacgtttcccgtagctctaccggtaatctggtggaatggtatctgctgcgtaaagcgtatgaacgcaacgaaattgcgccgaataaaccggatgaacgtgaactggcacgtcgccgtggcggttatgcaggcggttacgttaaagaaccggaacgcggcctgtgggataatatcgtctatctggactttatgagtctgtacccgtccattatcattacccataacgttagtccggacacgttcaatcgtgaaggctgcaaagaatatgataccgccccgcaggttggtcacaagttttgtaaagacgtccaaggcttcattccgagtctgctgggtgccctgctggatgaacgccagaaaatcaagaaacgtatgaaggcatccattgatccgctggaaaagaaactgctggactatcgccaaaaggcgatcaaaattctggccaactcatattacggctattacggttatgcacgcgctcgttggtactgcaaagaatgtgcagaatcggtgaccgcttggggccgtgattatattgaaaccacgatccacgaaattgaagaacgctttggtttcaaagttctgtacgctgataccgacggctttttcgcgacgatcccgggtgcggatgccgaaaccgtgaagaaaaaggctaaggaattcctgaagtacatcaacgcgaaactgccgggcctgctggaactggaatatgaaggcttctacgtccgtggctttttcgtgaccaaaaagaaatacgcggttatcgacgaagaaggcaaaattaccacgcgcggtctggaaatcgtgcgccgtgattggagtgaaattgccaaagaaacccaggcacgcgtcctggaagcaatcctgaaagatggtgacgtggaagaagccgtccgtattgtgaaagaagttacggaaaaactgtccaaatatgaagttccgccggaaaaactggtcatccatgaacaaattacccgcgaactgaaagattacaaagcgacgggcccgcacgtcgcaatcgctaaacgtctggcggcgcgtggcgtgaaaattcgtccgggtaccgtgatctcatatattgttctgaaaggctcgggtcgtatcggtgaccgcgctattccgtttgatgaattcgacccgaaaaaacacaaatacgatgcggaatactacatcgaaaaccaggttctgccggccgtcgaacgtattctgcgcgcatttggctaccgtaaagaagatctgcgttatcaaaaaaccaaacaagtgggtctgggtgcgtggctgaaaccgaaaggtaaaaaataa

SEQ ID NO: 367 - DNA, 2325 bp, Artificial Sequence
  Synthetic
atgattctggatgctgattacattacggaagatggcaagccgattattcgcctgttcaaaaaggaaaacggtcgcttcaaggtggaatacgatcgtaactttcgcccgtatatttacgctctgctgaaagatgacagcgcgatcgatgacgtgcgtaaaattacctctgaacgccacggcaaggtggttcgtgtcatcgatgtggaaaaggttaaaaagaaattcctgggtcgcccgatcgaagtgtggaaactgtatttcgaacatccgcaggatgttccggctatgcgtgacaaaattcgcgaacacccggcggttatcgatatttttgaatatgacatcccgttcgctaaacgttacctgatcgataagggcctgattccgatggagggtaacgaagaactgacctttctggcggtggacattgaaacgctgtaccatgaaggcgaagaattcggcaaaggtccgattatcatgatcagctatgcagatgaagaaggtgctaaagtcatcacctggaagaaaattgacctgccgtatgtggaagtcgtggccaatgaacgtgaaatgattaagcgcctgatcaaagttattcgcgaaaaagatccggacgtcattatcacgtataacggcgataattttgacttcccgtacctgctgaagcgtgccgaaaaactgggcatgaagctgccgctgggtcgcgataacagtgaaccgaaaatgcagcgtctgggcgactccctggcagttgaaatcaaaggtcgcattcattttgacctgtttccggtgatccgtcgcaccattaatctgccgacctatacgctggaagcggtttacgaagccatcttcggcaagcaaaaggaaaaggtctacccgcacgaaatcgcagaagcttgggaaaccggcaaaggtctggaacgtgtcgccaagtatagtatggaagatgcaaaagtgacgtacgaactgggcaaggaatttttcccgatggaagcacagctggctcgcctggtgggccaaccgctgtgggacgtttcccgtagctctaccggtaatctggtggaatggtatctgctgcgtaaagcgtatgaacgcaacgaaattgcgccgaataaaccggatgaacgtgaactggcacgtcgccgtggcggttatgcaggcggttacgttaaagaaccggaacgcggcctgtgggataatatcgtctatctggactttatgagtctgtacccgtccattatcattacccataacgttagtccggacacgttcaatcgtgaaggctgcaaagaatatgataccgccccgcaggttggtcacaagttttgtaaagacgtccaaggcttcattccgagtctgctgggtgccctgctggatgaacgccagaaaatcaagaaacgtatgaaggcatccattgatccgctggaaaagaaactgctggactatcgccaaaaggcgatcaaaattctggccaactcatattacggctattacggttatgcacgcgctcgttggtactgcaaagaatgtgcagaatcggtgaccgcttggggccgtgattatattgaaaccacgatccacgaaattgaagaacgctttggtttcaaagttctgtacgctgataccgacggctttttcgcgacgatcccgggtgcggatgccgaaaccgtgaagaaaaaggctaaggaattcctgaagtacatcaacgcgaaactgccgggcctgctggaactggaatatgaaggcttctacgtccgtggctttttcgtgaccaaaaagaaatacgcggttatcgacgaagaaggcaaaattaccacgcgcggtctggaaatcgtgcgccgtgattggagtgaaattgccaaagaaacccaggcacgtgttctggaagcaattctgaaacatggtaacgtcgaagaagcggtcaaaatcgtgaaagaagttacggaaaaactgtctaactacgaaattccgccggaaaaactggccatctacgaacaaattacccgcccgctgcatgaatataaagcaatcggtccgcacgtcgcagtggcaaaacgtctggcagcacgcggcgttaaagtcaaaccgggtatggtcatcggctatattgtgctgcgtggtgatggcccgatcagcaaccgcgcaattctggctgaagaatacgatctgaaaaaacacaaatacgacgccgaatattacatcgaaaatcaggttctgccggctgtcctgcgtattctggaagcgtttggctatcgtaaagaagatctgcgctggcagaaaacccgtcaaacgggtctgacctcatggctgaatattaaaaaatcgtaa

SEQ ID NO: 368 - DNA, 2325 bp, Artificial Sequence
  Synthetic
atgattctggatgctgattacattacggaagatggcaagccgattattcgcctgttcaaaaaggaaaacggtcgcttcaaggtggaatacgatcgtaactttcgcccgtatatttacgctctgctgaaagatgacagcgcgatcgatgacgtgcgtaaaattacctctgaacgccacggcaaggtggttcgtgtcatcgatgtggaaaaggttaaaaagaaattcctgggtcgcccgatcgaagtgtggaaactgtatttcgaacatccgcaggatgttccggctatgcgtgacaaaattcgcgaacacccggcggttatcgatatttttgaatatgacatcccgttcgctaaacgttacctgatcgataagggcctgattccgatggagggtaacgaagaactgacctttctggcggtggacattgaaacgctgtaccatgaaggcgaagaattcggcaaaggtccgattatcatgatcagctatgcagatgaagaaggtgctaaagtcatcacctggaagaaaattgacctgccgtatgtggaagtcgtggccaatgaacgtgaaatgattaagcgcctgatcaaagttattcgcgaaaaagatccggacgtcattatcacgtataacggcgataattttgacttcccgtacctgctgaagcgtgccgaaaaactgggcatgaagctgccgctgggtcgcgataacagtgaaccgaaaatgcagcgtctgggcgactccctggcagttgaaatcaaaggtcgcattcattttgacctgtttccggtgatccgtcgcaccattaatctgccgacctatacgctggaagcggtttacgaagccatcttcggcaagcaaaaggaaaaggtctacccgcacgaaatcgcagaagcttgggaaaccggcaaaggtctggaacgtgtcgccaagtatagtatggaagatgcaaaagtgacgtacgaactgggcaaggaatttttcccgatggaagcacagctggctcgcctggtgggccaaccgctgtgggacgtttcccgtagctctaccggtaatctggtggaatggtatctgctgcgtaaagcgtatgaacgcaacgaaattgcgccgaataaaccggatgaacgtgaactggcacgtcgccgtggcggttatgcaggcggttacgttaaagaaccggaacgcggcctgtgggataatatcgtctatctggactttatgagtctgtacccgtccattatcattacccataacgttagtccggacacgttcaatcgtgaaggctgcaaagaatatgataccgccccgcaggttggtcacaagttttgtaaagacgtccaaggcttcattccgagtctgctgggtgccctgctggatgaacgccagaaaatcaagaaacgtatgaaggcatccattgatccgctggaaaagaaactgctggactatcgccaaaaggcgatcaaaattctggccaactcatattacggctattacggttatgcacgcgctcgttggtactgcaaagaatgtgcagaatcggtgaccgcttggggccgtgattatattgaaaccacgatccacgaaattgaagaacgctttggtttcaaagttctgtacgctgataccgacggctttttcgcgacgatcccgggtgcggatgccgaaaccgtgaagaaaaaggctaaggaattcctgaagtacatcaacgcgaaactgccgggcctgctggaactggaatatgaaggcttctacgtccgtggctttttcgtgaccaaaaagaaatacgcggttatcgacgaagaaggcaaaattaccacgcgcggtctggaaatcgtgcgccgtgattggagtgaaattgccaaagaaacccaggcaaaagttctggaagcaatcctgaaacatggtaatgtcgaagaagcagtgaaaattgtcaaggaagtgacggaaaaactgtcgaagtatgaaatcccgccggaaaaactggtgatctacgaacaaattacccgcccgctgcatgaatataaagcgattggcccgcacgtggcagttgctaaacgtctggcagcccgcggtgtcaaagtgcgtccgggcatggtgatcggttatattgttctgcgtggcgatggtccgatcagtaaacgcgcgattctggccgaagaatttgatccgcgcaaacacaagtacgacgccgaatattacatcgaaaaccaggtgctgccggctgttctgcgtattctggaagcgttcggctatcgtaaagaagatctgcgctggcagaaaaccaagcaaacgggtctgaccgcatggctgaatgtgaaaaagaaataa

SEQ ID NO: 369 - DNA, 2328 bp, Artificial Sequence
  Synthetic
atgattctggatgctgattacattacggaagatggcaagccgattattcgcctgttcaaaaaggaaaacggtcgcttcaaggtggaatacgatcgtaactttcgcccgtatatttacgctctgctgaaagatgacagcgcgatcgatgacgtgcgtaaaattacctctgaacgccacggcaaggtggttcgtgtcatcgatgtggaaaaggttaaaaagaaattcctgggtcgcccgatcgaagtgtggaaactgtatttcgaacatccgcaggatgttccggctatgcgtgacaaaattcgcgaacacccggcggttatcgatatttttgaatatgacatcccgttcgctaaacgttacctgatcgataagggcctgattccgatggagggtaacgaagaactgacctttctggcggtggacattgaaacgctgtaccatgaaggcgaagaattcggcaaaggtccgattatcatgatcagctatgcagatgaagaaggtgctaaagtcatcacctggaagaaaattgacctgccgtatgtggaagtcgtggccaatgaacgtgaaatgattaagcgcctgatcaaagttattcgcgaaaaagatccggacgtcattatcacgtataacggcgataattttgacttcccgtacctgctgaagcgtgccgaaaaactgggcatgaagctgccgctgggtcgcgataacagtgaaccgaaaatgcagcgtctgggcgactccctggcagttgaaatcaaaggtcgcattcattttgacctgtttccggtgatccgtcgcaccattaatctgccgacctatacgctggaagcggtttacgaagccatcttcggcaagcaaaaggaaaaggtctacccgcacgaaatcgcagaagcttgggaaaccggcaaaggtctggaacgtgtcgccaagtatagtatggaagatgcaaaagtgacgtacgaactgggcaaggaatttttcccgatggaagcacagctggctcgcctggtgggccaaccgctgtgggacgtttcccgtagctctaccggtaatctggtggaatggtatctgctgcgtaaagcgtatgaacgcaacgaactggctccgaataagccggatgaacgcgaactggttcgtcgccgtaacagctataccggcggttacgtcaaagaaccggaacgcggcctgtgggataatatcgtttatctggactttcgtagtctgtacccgtccattatcattacccataacgtgtcaccggacacgctgaatcgtgaaggctgcaaagaatatgatgaagccccgcaagtgggtcacaagttctgtaaagactttccgggcttcattccgtcgctgctgggtaacctgctggatgaacgccagaaaatcaagaaacgtatgaaggcaaccattgatccgctggaaaagaaactgctggactatcgtcaacgcgctatcaaaattctggcgaattcttattacggctattacgcgtatgcgcgtgcgcgctggtactgcaaagaatgtgccgaaagtgtgaccgcatggggccgcgaatatattgaaatgtccatccgtgaaatcgaagaaaagtacggtttcaaggttctgtacgcggataccgacggtttccacgcaacgatcccgggtgccgatgcagaaaccgtgaagaaaaaggcgatggaattcctgaagtacatcaacgctaagctgccgggtgcgctggaactggaatatgaaggcttctacaaacgtggctttttcgtgacgaaaaagaaatacgccgttatcgacgaagaaggcaaaattaccacgcgcggtctggaaatcgtgcgccgtgattggagtgaaattgccaaagaaacccaggcacgcgttctggaagcaatcctgcgtcatggtgacgtcgaagaagccgttcgcattgtcaaagatgtgacggaaaagctgtcgaaatatgaagtcccgccggaaaaactggtgatccatgaacaaattacccgtgaactgaaggattacaaagcgacgggcccgcacgttgcaattgctaaacgcctggcagcccgtggcatcaagattcgtccgggtaccgttatcagctatattgtcctgaaaggctctggtcgcatcggtgatcgtgctattccgtttgatgaattcgacccgacgaaacaccgttacgatgccgaatattacatcgaaaatcaggtgctgccggccgttgaacgcattctgaaagcatttggctataagaaagaagaactgcgctaccagaaaacccgtcaagtgggcctgggtgcgtggctgaagctgaaaggtaagaaataa

SEQ ID NO: 370 - DNA, 2322 bp, Artificial Sequence
  Synthetic
atgattctggatgctgattacattacggaagatggcaagccgattattcgcctgttcaaaaaggaaaacggtcgcttcaaggtggaatacgatcgtaactttcgcccgtatatttacgctctgctgaaagatgacagcgcgatcgatgacgtgcgtaaaattacctctgaacgccacggcaaggtggttcgtgtcatcgatgtggaaaaggttaaaaagaaattcctgggtcgcccgatcgaagtgtggaaactgtatttcgaacatccgcaggatgttccggctatgcgtgacaaaattcgcgaacacccggcggttatcgatatttttgaatatgacatcccgttcgctaaacgttacctgatcgataagggcctgattccgatggagggtaacgaagaactgacctttctggcggtggacattgaaacgctgtaccatgaaggcgaagaattcggcaaaggtccgattatcatgatcagctatgcagatgaagaaggtgctaaagtcatcacctggaagaaaattgacctgccgtatgtggaagtcgtggccaatgaacgtgaaatgattaagcgcctgatcaaagttattcgcgaaaaagatccggacgtcattatcacgtataacggcgataattttgacttcccgtacctgctgaagcgtgccgaaaaactgggcatgaagctgccgctgggtcgcgataacagtgaaccgaaaatgcagcgtctgggcgactccctggcagttgaaatcaaaggtcgcattcattttgacctgtttccggtgatccgtcgcaccattaatctgccgacctatacgctggaagcggtttacgaagccatcttcggcaagcaaaaggaaaaggtctacccgcacgaaatcgcagaagcttgggaaaccggcaaaggtctggaacgtgtcgccaagtatagtatggaagatgcaaaagtgacgtacgaactgggcaaggaatttttcccgatggaagcacagctggctcgcctggtgggccaaccgctgtgggacgtttcccgtagctctaccggtaatctggtggaatggtatctgctgcgtaaagcgtatgaacgcaacgaactggctccgaataagccggatgaacgcgaactggttcgtcgccgtaacagctataccggcggttacgtcaaagaaccggaacgcggcctgtgggataatatcgtttatctggactttcgtagtctgtacccgtccattatcattacccataacgtgtcaccggacacgctgaatcgtgaaggctgcaaagaatatgatgaagccccgcaagtgggtcacaagttctgtaaagactttccgggcttcattccgtcgctgctgggtaacctgctggatgaacgccagaaaatcaagaaacgtatgaaggcaaccattgatccgctggaaaagaaactgctggactatcgtcaacgcgctatcaaaattctggcgaattcttattacggctattacgcgtatgcgcgtgcgcgctggtactgcaaagaatgtgccgaaagtgtgaccgcatggggccgcgaatatattgaaatgtccatccgtgaaatcgaagaaaagtacggtttcaaggttctgtacgcggataccgacggtttccacgcaacgatcccgggtgccgatgcagaaaccgtgaagaaaaaggcgatggaattcctgaagtacatcaacgctaagctgccgggtgcgctggaactggaatatgaaggcttctacaaacgtggctttttcgtgacgaaaaagaaatacgccgttatcgacgaagaaggcaaaattaccacgcgcggtctggaaatcgtgcgccgtgattggagtgaaattgccaaagaaacccaggcacgtgtcctggaagcaatcctgaaacatggtgatgtggaagaagcggttcgcattgtcaaagaagtgacggaaaagctgtcgaaatatgaagttccgccggaaaaactggtcatccatgaacaaattacccgcgatctgcgtgactacaaagccacgggtccgcacgtggcagttgcaaaacgtctggcagcccgtggcgtgaagattcgtccgggtaccgtgatcagttatattgttctgaaaggctccggtcgcatcggtgaccgtgctattccgtttgatgaattcgacccgacgaaacaccgttacgatgccgaatattacatcgaaaatcaggtcctgccggccgtggaacgcattctgaaagcatttggttatcgcaaggaagatctgcgttaccagaagaccaaacaagtcggcctgggtgcgtggctgaaagtgaaaaagtaa

SEQ ID NO: 371 - DNA, 2328 bp, Artificial Sequence
  Synthetic
atgattctggatgctgattacattacggaagatggcaagccgattattcgcctgttcaaaaaggaaaacggtcgcttcaaggtggaatacgatcgtaactttcgcccgtatatttacgctctgctgaaagatgacagcgcgatcgatgacgtgcgtaaaattacctctgaacgccacggcaaggtggttcgtgtcatcgatgtggaaaaggttaaaaagaaattcctgggtcgcccgatcgaagtgtggaaactgtatttcgaacatccgcaggatgttccggctatgcgtgacaaaattcgcgaacacccggcggttatcgatatttttgaatatgacatcccgttcgctaaacgttacctgatcgataagggcctgattccgatggagggtaacgaagaactgacctttctggcggtggacattgaaacgctgtaccatgaaggcgaagaattcggcaaaggtccgattatcatgatcagctatgcagatgaagaaggtgctaaagtcatcacctggaagaaaattgacctgccgtatgtggaagtcgtggccaatgaacgtgaaatgattaagcgcctgatcaaagttattcgcgaaaaagatccggacgtcattatcacgtataacggcgataattttgacttcccgtacctgctgaagcgtgccgaaaaactgggcatgaagctgccgctgggtcgcgataacagtgaaccgaaaatgcagcgtctgggcgactccctggcagttgaaatcaaaggtcgcattcattttgacctgtttccggtgatccgtcgcaccattaatctgccgacctatacgctggaagcggtttacgaagccatcttcggcaagcaaaaggaaaaggtctacccgcacgaaatcgcagaagcttgggaaaccggcaaaggtctggaacgtgtcgccaagtatagtatggaagatgcaaaagtgacgtacgaactgggcaaggaatttttcccgatggaagcacagctggctcgcctggtgggccaaccgctgtgggacgtttcccgtagctctaccggtaatctggtggaatggtatctgctgcgtaaagcgtatgaacgcaacgaactggctccgaataagccggatgaacgcgaactggttcgtcgccgtaacagctataccggcggttacgtcaaagaaccggaacgcggcctgtgggataatatcgtttatctggactttcgtagtctgtacccgtccattatcattacccataacgtgtcaccggacacgctgaatcgtgaaggctgcaaagaatatgatgaagccccgcaagtgggtcacaagttctgtaaagactttccgggcttcattccgtcgctgctgggtaacctgctggatgaacgccagaaaatcaagaaacgtatgaaggcaaccattgatccgctggaaaagaaactgctggactatcgtcaacgcgctatcaaaattctggcgaattcttattacggctattacgcgtatgcgcgtgcgcgctggtactgcaaagaatgtgccgaaagtgtgaccgcatggggccgcgaatatattgaaatgtccatccgtgaaatcgaagaaaagtacggtttcaaggttctgtacgcggataccgacggtttccacgcaacgatcccgggtgccgatgcagaaaccgtgaagaaaaaggcgatggaattcctgaagtacatcaacgctaagctgccgggtgcgctggaactggaatatgaaggcttctacaaacgtggctttttcgtgacgaaaaagaaatacgccgttatcgacgaagaaggcaaaattaccacgcgcggtctggaaatcgtgcgccgtgattggagtgaaattgccaaagaaacccaggcacgtgtgctggaagctctgctgaaagatggcaatgttgaagaagcggtttccattgtcaaagaagtgacggaaaagctgggtaaatatgaagtcccgccggaaaaactggtgatccatgaacaaattacccgcgaactgaaggattacaaagcgacgggcccgcacgttgctatcgcgaaacgtctggcagcgcgtggcgtgaagattcgtccgggtaccgttatcagctatattgtcctgaaaggctctggtcgtatcggtgaccgcgcgattccgtttgatgaattcgacccgacgaaacatcgctacgatgcagaatattacatcgaaaaccaggttctgccggctgtcgaacgtattctgaaagcgtttggctatcgtgccgaagatctgcgctaccagaaaacccgtcaagtgggcctgggtgtttggctgcaaccgaaaggtaagaaataa

SEQ ID NO: 372 - DNA, 2325 bp, Artificial Sequence
  Synthetic
atgattctggatgctgattacattacggaagatggcaagccgattattcgcctgttcaaaaaggaaaacggtcgcttcaaggtggaatacgatcgtaactttcgcccgtatatttacgctctgctgaaagatgacagcgcgatcgatgacgtgcgtaaaattacctctgaacgccacggcaaggtggttcgtgtcatcgatgtggaaaaggttaaaaagaaattcctgggtcgcccgatcgaagtgtggaaactgtatttcgaacatccgcaggatgttccggctatgcgtgacaaaattcgcgaacacccggcggttatcgatatttttgaatatgacatcccgttcgctaaacgttacctgatcgataagggcctgattccgatggagggtaacgaagaactgacctttctggcggtggacattgaaacgctgtaccatgaaggcgaagaattcggcaaaggtccgattatcatgatcagctatgcagatgaagaaggtgctaaagtcatcacctggaagaaaattgacctgccgtatgtggaagtcgtggccaatgaacgtgaaatgattaagcgcctgatcaaagttattcgcgaaaaagatccggacgtcattatcacgtataacggcgataattttgacttcccgtacctgctgaagcgtgccgaaaaactgggcatgaagctgccgctgggtcgcgataacagtgaaccgaaaatgcagcgtctgggcgactccctggcagttgaaatcaaaggtcgcattcattttgacctgtttccggtgatccgtcgcaccattaatctgccgacctatacgctggaagcggtttacgaagccatcttcggcaagcaaaaggaaaaggtctacccgcacgaaatcgcagaagcttgggaaaccggcaaaggtctggaacgtgtcgccaagtatagtatggaagatgcaaaagtgacgtacgaactgggcaaggaatttttcccgatggaagcacagctggctcgcctggtgggccaaccgctgtgggacgtttcccgtagctctaccggtaatctggtggaatggtatctgctgcgtaaagcgtatgaacgcaacgaactggctccgaataagccggatgaacgcgaactggttcgtcgccgtaacagctataccggcggttacgtcaaagaaccggaacgcggcctgtgggataatatcgtttatctggactttcgtagtctgtacccgtccattatcattacccataacgtgtcaccggacacgctgaatcgtgaaggctgcaaagaatatgatgaagccccgcaagtgggtcacaagttctgtaaagactttccgggcttcattccgtcgctgctgggtaacctgctggatgaacgccagaaaatcaagaaacgtatgaaggcaaccattgatccgctggaaaagaaactgctggactatcgtcaacgcgctatcaaaattctggcgaattcttattacggctattacgcgtatgcgcgtgcgcgctggtactgcaaagaatgtgccgaaagtgtgaccgcatggggccgcgaatatattgaaatgtccatccgtgaaatcgaagaaaagtacggtttcaaggttctgtacgcggataccgacggtttccacgcaacgatcccgggtgccgatgcagaaaccgtgaagaaaaaggcgatggaattcctgaagtacatcaacgctaagctgccgggtgcgctggaactggaatatgaaggcttctacaaacgtggctttttcgtgacgaaaaagaaatacgccgttatcgacgaagaaggcaaaattaccacgcgcggtctggaaatcgtgcgccgtgattggagtgaaattgccaaagaaacccaggcaaaggttctggaagcaattctgaaacatggtaacgtcgaagaagcggtcaagatcgtgaaagaagttaccgaaaaactgtcgaattatgaaattccggtcgaaaagctggtgatctacgaacaaattacgcgcccgctgaacgaatataaagccattggcccgcacgtggcagttgctaaacgtctggcggccaagggtatcaagattaaaccgggcatggtgattggttatgttgtcctgcgcggcgatggtccgatcagcaaacgtgcgatcgccatcgaagaattcgatggcaaaaagcataagtacgacgcagaatactacatcgaaaatcaggttctgccggccgtcgaacgtatcctgaaagcattcggttataagcgtgaagatctgcgctggcagaagaccaaacaagtgggcctgggtgcgtggctgaaagttaaaaagtcttaa

SEQ ID NO: 373 - DNA, 2328 bp, Artificial Sequence
  Synthetic
atgattctggatgctgattacattacggaagatggcaagccgattattcgcctgttcaaaaaggaaaacggtcgcttcaaggtggaatacgatcgtaactttcgcccgtatatttacgctctgctgaaagatgacagcgcgatcgatgacgtgcgtaaaattacctctgaacgccacggcaaggtggttcgtgtcatcgatgtggaaaaggttaaaaagaaattcctgggtcgcccgatcgaagtgtggaaactgtatttcgaacatccgcaggatgttccggctatgcgtgacaaaattcgcgaacacccggcggttatcgatatttttgaatatgacatcccgttcgctaaacgttacctgatcgataagggcctgattccgatggagggtaacgaagaactgacctttctggcggtggacattgaaacgctgtaccatgaaggcgaagaattcggcaaaggtccgattatcatgatcagctatgcagatgaagaaggtgctaaagtcatcacctggaagaaaattgacctgccgtatgtggaagtcgtggccaatgaacgtgaaatgattaagcgcctgatcaaagttattcgcgaaaaagatccggacgtcattatcacgtataacggcgataattttgacttcccgtacctgctgaagcgtgccgaaaaactgggcatgaagctgccgctgggtcgcgataacagtgaaccgaaaatgcagcgtctgggcgactccctggcagttgaaatcaaaggtcgcattcattttgacctgtttccggtgatccgtcgcaccattaatctgccgacctatacgctggaagcggtttacgaagccatcttcggcaagcaaaaggaaaaggtctacccgcacgaaatcgcagaagcttgggaaaccggcaaaggtctggaacgtgtcgccaagtatagtatggaagatgcaaaagtgacgtacgaactgggcaaggaatttttcccgatggaagcacagctggctcgcctggtgggccaaccgctgtgggacgtttcccgtagctctaccggtaatctggtggaatggtatctgctgcgtaaagcgtatgaacgcaacgaactggctccgaataagccggatgaacgcgaactggttcgtcgccgtaacagctataccggcggttacgtcaaagaaccggaacgcggcctgtgggataatatcgtttatctggactttcgtagtctgtacccgtccattatcattacccataacgtgtcaccggacacgctgaatcgtgaaggctgcaaagaatatgatgaagccccgcaagtgggtcacaagttctgtaaagactttccgggcttcattccgtcgctgctgggtaacctgctggatgaacgccagaaaatcaagaaacgtatgaaggcaaccattgatccgctggaaaagaaactgctggactatcgtcaacgcgctatcaaaattctggcgaattcttattacggctattacgcgtatgcgcgtgcgcgctggtactgcaaagaatgtgccgaaagtgtgaccgcatggggccgcgaatatattgaaatgtccatccgtgaaatcgaagaaaagtacggtttcaaggttctgtacgcggataccgacggtttccacgcaacgatcccgggtgccgatgcagaaaccgtgaagaaaaaggcgatggaattcctgaagtacatcaacgctaagctgccgggtgcgctggaactggaatatgaaggcttctacaaacgtggctttttcgtgacgaaaaagaaatacgccgttatcgacgaagaaggcaaaattaccacgcgcggtctggaaatcgtgcgccgtgattggagtgaaattgccaaagaaacccaggcacgtgttctggaagcactgctgaaagatggtaatgtcgaagaagcagtgagtattgttaaagaagtcacggaaaaactgtccaagtatgaagtcccgccggaaaaactggtgattcatgaacaaatcacccgcgaactgaaagattacaaggcgacgggcccgcacgtggcaattgctaaacgtctggcagcgcgtggcgttaagatccgtccgggtaccgttattagctatatcgtcctgaaaggctctggtcgtattggtgaccgcgccatcccgtttgatgaattcgacccggctaaacaccgctacgatgcggaatattacattgaaaatcaggtcctgccggctgtggaacgtatcctgaaagcgtttggctatcgtaaggaagatctgcgctaccagaaaacccgtcaagtgggcctgggtgcgtggctgaaaccgaagggtaaaaagtaa

SEQ ID NO: 374 - DNA, 2328 bp, Artificial Sequence
  Synthetic
atgattctggatgctgattacattacggaagatggcaagccgattattcgcctgttcaaaaaggaaaacggtcgcttcaaggtggaatacgatcgtaactttcgcccgtatatttacgctctgctgaaagatgacagcgcgatcgatgacgtgcgtaaaattacctctgaacgccacggcaaggtggttcgtgtcatcgatgtggaaaaggttaaaaagaaattcctgggtcgcccgatcgaagtgtggaaactgtatttcgaacatccgcaggatgttccggctatgcgtgacaaaattcgcgaacacccggcggttatcgatatttttgaatatgacatcccgttcgctaaacgttacctgatcgataagggcctgattccgatggagggtaacgaagaactgacctttctggcggtggacattgaaacgctgtaccatgaaggcgaagaattcggcaaaggtccgattatcatgatcagctatgcagatgaagaaggtgctaaagtcatcacctggaagaaaattgacctgccgtatgtggaagtcgtggccaatgaacgtgaaatgattaagcgcctgatcaaagttattcgcgaaaaagatccggacgtcattatcacgtataacggcgataattttgacttcccgtacctgctgaagcgtgccgaaaaactgggcatgaagctgccgctgggtcgcgataacagtgaaccgaaaatgcagcgtctgggcgactccctggcagttgaaatcaaaggtcgcattcattttgacctgtttccggtgatccgtcgcaccattaatctgccgacctatacgctggaagcggtttacgaagccatcttcggcaagcaaaaggaaaaggtctacccgcacgaaatcgcagaagcttgggaaaccggcaaaggtctggaacgtgtcgccaagtatagtatggaagatgcaaaagtgacgtacgaactgggcaaggaatttttcccgatggaagcacagctggctcgcctggtgggccaaccgctgtgggacgtttcccgtagctctaccggtaatctggtggaatggtatctgctgcgtaaagcgtatgaacgcaacgaactggctccgaataagccggatgaacgcgaactggttcgtcgccgtaacagctataccggcggttacgtcaaagaaccggaacgcggcctgtgggataatatcgtttatctggactttcgtagtctgtacccgtccattatcattacccataacgtgtcaccggacacgctgaatcgtgaaggctgcaaagaatatgatgaagccccgcaagtgggtcacaagttctgtaaagactttccgggcttcattccgtcgctgctgggtaacctgctggatgaacgccagaaaatcaagaaacgtatgaaggcaaccattgatccgctggaaaagaaactgctggactatcgtcaacgcgctatcaaaattctggcgaattcttattacggctattacgcgtatgcgcgtgcgcgctggtactgcaaagaatgtgccgaaagtgtgaccgcatggggccgcgaatatattgaaatgtccatccgtgaaatcgaagaaaagtacggtttcaaggttctgtacgcggataccgacggtttccacgcaacgatcccgggtgccgatgcagaaaccgtgaagaaaaaggcgatggaattcctgaagtacatcaacgctaagctgccgggtgcgctggaactggaatatgaaggcttctacaaacgtggctttttcgtgacgaaaaagaaatacgccgttatcgacgaagaaggcaaaattaccacgcgcggtctggaaatcgtgcgccgtgattggagtgaaattgccaaagaaacccaggcacgcgtcctggaagcaatcctgaaagatggtgacgtggaagaagccgtccgtattgtgaaagaagttacggaaaaactgtccaaatatgaagttccgccggaaaaactggtcatccatgaacaaattacccgcgaactgaaagattacaaagcgacgggcccgcacgtcgcaatcgctaaacgtctggcggcgcgtggcgtgaaaattcgtccgggtaccgtgatctcatatattgttctgaaaggctcgggtcgtatcggtgaccgcgctattccgtttgatgaattcgacccgaaaaaacacaaatacgatgcggaatactacatcgaaaaccaggttctgccggccgtcgaacgtattctgcgcgcatttggctaccgtaaagaagatctgcgttatcaaaaaaccaaacaagtgggtctgggtgcgtggctgaaaccgaaaggtaaaaaataa

SEQ ID NO: 375 - DNA, 2325 bp, Artificial Sequence
  Synthetic
atgattctggatgctgattacattacggaagatggcaagccgattattcgcctgttcaaaaaggaaaacggtcgcttcaaggtggaatacgatcgtaactttcgcccgtatatttacgctctgctgaaagatgacagcgcgatcgatgacgtgcgtaaaattacctctgaacgccacggcaaggtggttcgtgtcatcgatgtggaaaaggttaaaaagaaattcctgggtcgcccgatcgaagtgtggaaactgtatttcgaacatccgcaggatgttccggctatgcgtgacaaaattcgcgaacacccggcggttatcgatatttttgaatatgacatcccgttcgctaaacgttacctgatcgataagggcctgattccgatggagggtaacgaagaactgacctttctggcggtggacattgaaacgctgtaccatgaaggcgaagaattcggcaaaggtccgattatcatgatcagctatgcagatgaagaaggtgctaaagtcatcacctggaagaaaattgacctgccgtatgtggaagtcgtggccaatgaacgtgaaatgattaagcgcctgatcaaagttattcgcgaaaaagatccggacgtcattatcacgtataacggcgataattttgacttcccgtacctgctgaagcgtgccgaaaaactgggcatgaagctgccgctgggtcgcgataacagtgaaccgaaaatgcagcgtctgggcgactccctggcagttgaaatcaaaggtcgcattcattttgacctgtttccggtgatccgtcgcaccattaatctgccgacctatacgctggaagcggtttacgaagccatcttcggcaagcaaaaggaaaaggtctacccgcacgaaatcgcagaagcttgggaaaccggcaaaggtctggaacgtgtcgccaagtatagtatggaagatgcaaaagtgacgtacgaactgggcaaggaatttttcccgatggaagcacagctggctcgcctggtgggccaaccgctgtgggacgtttcccgtagctctaccggtaatctggtggaatggtatctgctgcgtaaagcgtatgaacgcaacgaactggctccgaataagccggatgaacgcgaactggttcgtcgccgtaacagctataccggcggttacgtcaaagaaccggaacgcggcctgtgggataatatcgtttatctggactttcgtagtctgtacccgtccattatcattacccataacgtgtcaccggacacgctgaatcgtgaaggctgcaaagaatatgatgaagccccgcaagtgggtcacaagttctgtaaagactttccgggcttcattccgtcgctgctgggtaacctgctggatgaacgccagaaaatcaagaaacgtatgaaggcaaccattgatccgctggaaaagaaactgctggactatcgtcaacgcgctatcaaaattctggcgaattcttattacggctattacgcgtatgcgcgtgcgcgctggtactgcaaagaatgtgccgaaagtgtgaccgcatggggccgcgaatatattgaaatgtccatccgtgaaatcgaagaaaagtacggtttcaaggttctgtacgcggataccgacggtttccacgcaacgatcccgggtgccgatgcagaaaccgtgaagaaaaaggcgatggaattcctgaagtacatcaacgctaagctgccgggtgcgctggaactggaatatgaaggcttctacaaacgtggctttttcgtgacgaaaaagaaatacgccgttatcgacgaagaaggcaaaattaccacgcgcggtctggaaatcgtgcgccgtgattggagtgaaattgccaaagaaacccaggcacgtgttctggaagcaattctgaaacatggtaacgtcgaagaagcggtcaaaatcgtgaaagaagttacggaaaaactgtctaactacgaaattccgccggaaaaactggccatctacgaacaaattacccgcccgctgcatgaatataaagcaatcggtccgcacgtcgcagtggcaaaacgtctggcagcacgcggcgttaaagtcaaaccgggtatggtcatcggctatattgtgctgcgtggtgatggcccgatcagcaaccgcgcaattctggctgaagaatacgatctgaaaaaacacaaatacgacgccgaatattacatcgaaaatcaggttctgccggctgtcctgcgtattctggaagcgtttggctatcgtaaagaagatctgcgctggcagaaaacccgtcaaacgggtctgacctcatggctgaatattaaaaaatcgtaa

SEQ ID NO: 376 - DNA, 2325 bp, Artificial Sequence
  Synthetic
atgattctggatgctgattacattacggaagatggcaagccgattattcgcctgttcaaaaaggaaaacggtcgcttcaaggtggaatacgatcgtaactttcgcccgtatatttacgctctgctgaaagatgacagcgcgatcgatgacgtgcgtaaaattacctctgaacgccacggcaaggtggttcgtgtcatcgatgtggaaaaggttaaaaagaaattcctgggtcgcccgatcgaagtgtggaaactgtatttcgaacatccgcaggatgttccggctatgcgtgacaaaattcgcgaacacccggcggttatcgatatttttgaatatgacatcccgttcgctaaacgttacctgatcgataagggcctgattccgatggagggtaacgaagaactgacctttctggcggtggacattgaaacgctgtaccatgaaggcgaagaattcggcaaaggtccgattatcatgatcagctatgcagatgaagaaggtgctaaagtcatcacctggaagaaaattgacctgccgtatgtggaagtcgtggccaatgaacgtgaaatgattaagcgcctgatcaaagttattcgcgaaaaagatccggacgtcattatcacgtataacggcgataattttgacttcccgtacctgctgaagcgtgccgaaaaactgggcatgaagctgccgctgggtcgcgataacagtgaaccgaaaatgcagcgtctgggcgactccctggcagttgaaatcaaaggtcgcattcattttgacctgtttccggtgatccgtcgcaccattaatctgccgacctatacgctggaagcggtttacgaagccatcttcggcaagcaaaaggaaaaggtctacccgcacgaaatcgcagaagcttgggaaaccggcaaaggtctggaacgtgtcgccaagtatagtatggaagatgcaaaagtgacgtacgaactgggcaaggaatttttcccgatggaagcacagctggctcgcctggtgggccaaccgctgtgggacgtttcccgtagctctaccggtaatctggtggaatggtatctgctgcgtaaagcgtatgaacgcaacgaactggctccgaataagccggatgaacgcgaactggttcgtcgccgtaacagctataccggcggttacgtcaaagaaccggaacgcggcctgtgggataatatcgtttatctggactttcgtagtctgtacccgtccattatcattacccataacgtgtcaccggacacgctgaatcgtgaaggctgcaaagaatatgatgaagccccgcaagtgggtcacaagttctgtaaagactttccgggcttcattccgtcgctgctgggtaacctgctggatgaacgccagaaaatcaagaaacgtatgaaggcaaccattgatccgctggaaaagaaactgctggactatcgtcaacgcgctatcaaaattctggcgaattcttattacggctattacgcgtatgcgcgtgcgcgctggtactgcaaagaatgtgccgaaagtgtgaccgcatggggccgcgaatatattgaaatgtccatccgtgaaatcgaagaaaagtacggtttcaaggttctgtacgcggataccgacggtttccacgcaacgatcccgggtgccgatgcagaaaccgtgaagaaaaaggcgatggaattcctgaagtacatcaacgctaagctgccgggtgcgctggaactggaatatgaaggcttctacaaacgtggctttttcgtgacgaaaaagaaatacgccgttatcgacgaagaaggcaaaattaccacgcgcggtctggaaatcgtgcgccgtgattggagtgaaattgccaaagaaacccaggcaaaagttctggaagcaatcctgaaacatggtaatgtcgaagaagcagtgaaaattgtcaaggaagtgacggaaaaactgtcgaagtatgaaatcccgccggaaaaactggtgatctacgaacaaattacccgcccgctgcatgaatataaagcgattggcccgcacgtggcagttgctaaacgtctggcagcccgcggtgtcaaagtgcgtccgggcatggtgatcggttatattgttctgcgtggcgatggtccgatcagtaaacgcgcgattctggccgaagaatttgatccgcgcaaacacaagtacgacgccgaatattacatcgaaaaccaggtgctgccggctgttctgcgtattctggaagcgttcggctatcgtaaagaagatctgcgctggcagaaaaccaagcaaacgggtctgaccgcatggctgaatgtgaaaaagaaataa

SEQ ID NO: 377 - DNA, 2328 bp, Artificial Sequence
  Synthetic
atgatcctggatgcggactacattaccgaagacggcaaaccggtcgtgcgtatcttcaaaaaagaaaacggcgaattcaaaatcgaatatgatcgcaactttgaaccgtatatctacgctctgctgaaagatgactccgcgatcgaagaagtgaagaaaattaccgccgaacgccatggcaaagtggttcgtgtcaaacgcgcagaaaaagtgaagaaaaaatttctgggtcgtccgattgaagtttggaaactgtatttcgaacatccgcaggatgtcccggctatccgtgacaaaattcgcgaacacccggcggtcgtggatatctatgaatacgacattccgtttgctaaacgttatctgatcgataaaggcctgattccgatggaaggtgacgaagaactgaaaatgctggcctttgatattgaaaccctgtatcacgaaggcgaagaattcggcaaaggtccgatcctgatgatttcatacgcagacgaagaagaagcgcgtgtgatcacctggaagaaaattgatctgccgtatgttgaagttgtctcgacggaacgtgaaatgatcaaacgttttctgcgcgtcattaaagaaaaagatccggacgtgctgatcacctataacggcgataattttgacttcgcatacctgaaaaaacgctgcgaaaaactgggtatcaaattcacgctgggccgtgatggtagcgaaccgaaaattcaacgtatgggcgatcgctttgcggtggacgttaaaggtcgcattcatttcgatctgtatccggttatccgtcgcaccattaatctgccgacctatacgctggaagcggtttacgaagccatctttggcaaaccgaaagaaaaagtgtacgccgaagaaattgcagaagcttgggaaaccggcgaaggtctggaacgtgtggcccgctattcaatggaagatgcaaaagttacgtacgaactgggtcgtgaatttttcccgatggaagcgcagctgagccgcctgattggccaaccgctgtgggatgtttctcgtagctctaccggtaacctggtcgaatggttcctgctgcgtaaagcgtatgaacgcaacgaactggcaccgaataaaccgtccggccgcgaatacgatgaacgtcgcggcggttatgcgggcggttacgttaaagaaccggaaaagggtctgtgggaaaacatcgtctacctggattacaagagtctgtatccgtccattatcattacccataacgttagtccggacacgctgaatcgcgaaggctgcaaagaatacgatgtggcgccgcaggttggtcaccgtttttgtaaagactttccgggcttcattccgtccctgctgggtgatctgctggaagaacgtcagaaaatcaagcgcaaaatgaaggccaccattgatccgatcgaacgtcgcctgctggactatcgtcaacgcgcgatcaaaattctggccaacagctattacggctattacggttatgcgcgtgcccgctggtactgcaaagaatgtgcagaaagcgttacggcttggggccgcgaatacatcgaaatgtctatccgtgaaatcgaagaaaagtacggtttcaaggtgctgtacgctgataccgacggcttccatgcgacgattccgggtgaagatgccgaaaccatcaaaaagaaagcaatggaattcctgaagtacatcaactcaaagctgccgggcgccctggaactggaatatgaaggcttctaccgtcgcggctttttcgttacgaagaaaaagtacgcagtcattgacgaagaaggcaaaatcaccacgcgcggtctggaaattgtgcgtcgcgattggagtgaaattgccaaagaaacccaggcacgcgttctggaagcaatcctgcgtcatggtgacgtcgaagaagccgttcgcattgtcaaagatgtgacggaaaagctgtcgaaatatgaagtcccgccggaaaaactggtgatccatgaacaaattacccgtgaactgaaggattacaaagcgacgggcccgcacgttgcaattgctaaacgcctggcagcccgtggcatcaagattcgtccgggtaccgttatcagctatattgtcctgaaaggctctggtcgcatcggtgatcgtgctattccgtttgatgaattcgacccgacgaaacaccgttacgatgccgaatattacatcgaaaatcaggtgctgccggccgttgaacgcattctgaaagcatttggctataagaaagaagaactgcgctaccagaaaacccgtcaagtgggcctgggtgcgtggctgaagctgaaaggtaagaaataa

SEQ ID NO: 378 - DNA, 2322 bp, Artificial Sequence
  Synthetic
atgatcctggatgcggactacattaccgaagacggcaaaccggtcgtgcgtatcttcaaaaaagaaaacggcgaattcaaaatcgaatatgatcgcaactttgaaccgtatatctacgctctgctgaaagatgactccgcgatcgaagaagtgaagaaaattaccgccgaacgccatggcaaagtggttcgtgtcaaacgcgcagaaaaagtgaagaaaaaatttctgggtcgtccgattgaagtttggaaactgtatttcgaacatccgcaggatgtcccggctatccgtgacaaaattcgcgaacacccggcggtcgtggatatctatgaatacgacattccgtttgctaaacgttatctgatcgataaaggcctgattccgatggaaggtgacgaagaactgaaaatgctggcctttgatattgaaaccctgtatcacgaaggcgaagaattcggcaaaggtccgatcctgatgatttcatacgcagacgaagaagaagcgcgtgtgatcacctggaagaaaattgatctgccgtatgttgaagttgtctcgacggaacgtgaaatgatcaaacgttttctgcgcgtcattaaagaaaaagatccggacgtgctgatcacctataacggcgataattttgacttcgcatacctgaaaaaacgctgcgaaaaactgggtatcaaattcacgctgggccgtgatggtagcgaaccgaaaattcaacgtatgggcgatcgctttgcggtggacgttaaaggtcgcattcatttcgatctgtatccggttatccgtcgcaccattaatctgccgacctatacgctggaagcggtttacgaagccatctttggcaaaccgaaagaaaaagtgtacgccgaagaaattgcagaagcttgggaaaccggcgaaggtctggaacgtgtggcccgctattcaatggaagatgcaaaagttacgtacgaactgggtcgtgaatttttcccgatggaagcgcagctgagccgcctgattggccaaccgctgtgggatgtttctcgtagctctaccggtaacctggtcgaatggttcctgctgcgtaaagcgtatgaacgcaacgaactggcaccgaataaaccgtccggccgcgaatacgatgaacgtcgcggcggttatgcgggcggttacgttaaagaaccggaaaagggtctgtgggaaaacatcgtctacctggattacaagagtctgtatccgtccattatcattacccataacgttagtccggacacgctgaatcgcgaaggctgcaaagaatacgatgtggcgccgcaggttggtcaccgtttttgtaaagactttccgggcttcattccgtccctgctgggtgatctgctggaagaacgtcagaaaatcaagcgcaaaatgaaggccaccattgatccgatcgaacgtcgcctgctggactatcgtcaacgcgcgatcaaaattctggccaacagctattacggctattacggttatgcgcgtgcccgctggtactgcaaagaatgtgcagaaagcgttacggcttggggccgcgaatacatcgaaatgtctatccgtgaaatcgaagaaaagtacggtttcaaggtgctgtacgctgataccgacggcttccatgcgacgattccgggtgaagatgccgaaaccatcaaaaagaaagcaatggaattcctgaagtacatcaactcaaagctgccgggcgccctggaactggaatatgaaggcttctaccgtcgcggctttttcgttacgaagaaaaagtacgcagtcattgacgaagaaggcaaaatcaccacgcgcggtctggaaattgtgcgtcgcgattggagtgaaattgccaaagaaacccaggcacgtgtcctggaagcaatcctgaaacatggtgatgtggaagaagcggttcgcattgtcaaagaagtgacggaaaagctgtcgaaatatgaagttccgccggaaaaactggtcatccatgaacaaattacccgcgatctgcgtgactacaaagccacgggtccgcacgtggcagttgcaaaacgtctggcagcccgtggcgtgaagattcgtccgggtaccgtgatcagttatattgttctgaaaggctccggtcgcatcggtgaccgtgctattccgtttgatgaattcgacccgacgaaacaccgttacgatgccgaatattacatcgaaaatcaggtcctgccggccgtggaacgcattctgaaagcatttggttatcgcaaggaagatctgcgttaccagaagaccaaacaagtcggcctgggtgcgtggctgaaagtgaaaaagtaa

SEQ ID NO: 379 - DNA, 2328 bp, Artificial Sequence
  Synthetic
atgatcctggatgcggactacattaccgaagacggcaaaccggtcgtgcgtatcttcaaaaaagaaaacggcgaattcaaaatcgaatatgatcgcaactttgaaccgtatatctacgctctgctgaaagatgactccgcgatcgaagaagtgaagaaaattaccgccgaacgccatggcaaagtggttcgtgtcaaacgcgcagaaaaagtgaagaaaaaatttctgggtcgtccgattgaagtttggaaactgtatttcgaacatccgcaggatgtcccggctatccgtgacaaaattcgcgaacacccggcggtcgtggatatctatgaatacgacattccgtttgctaaacgttatctgatcgataaaggcctgattccgatggaaggtgacgaagaactgaaaatgctggcctttgatattgaaaccctgtatcacgaaggcgaagaattcggcaaaggtccgatcctgatgatttcatacgcagacgaagaagaagcgcgtgtgatcacctggaagaaaattgatctgccgtatgttgaagttgtctcgacggaacgtgaaatgatcaaacgttttctgcgcgtcattaaagaaaaagatccggacgtgctgatcacctataacggcgataattttgacttcgcatacctgaaaaaacgctgcgaaaaactgggtatcaaattcacgctgggccgtgatggtagcgaaccgaaaattcaacgtatgggcgatcgctttgcggtggacgttaaaggtcgcattcatttcgatctgtatccggttatccgtcgcaccattaatctgccgacctatacgctggaagcggtttacgaagccatctttggcaaaccgaaagaaaaagtgtacgccgaagaaattgcagaagcttgggaaaccggcgaaggtctggaacgtgtggcccgctattcaatggaagatgcaaaagttacgtacgaactgggtcgtgaatttttcccgatggaagcgcagctgagccgcctgattggccaaccgctgtgggatgtttctcgtagctctaccggtaacctggtcgaatggttcctgctgcgtaaagcgtatgaacgcaacgaactggcaccgaataaaccgtccggccgcgaatacgatgaacgtcgcggcggttatgcgggcggttacgttaaagaaccggaaaagggtctgtgggaaaacatcgtctacctggattacaagagtctgtatccgtccattatcattacccataacgttagtccggacacgctgaatcgcgaaggctgcaaagaatacgatgtggcgccgcaggttggtcaccgtttttgtaaagactttccgggcttcattccgtccctgctgggtgatctgctggaagaacgtcagaaaatcaagcgcaaaatgaaggccaccattgatccgatcgaacgtcgcctgctggactatcgtcaacgcgcgatcaaaattctggccaacagctattacggctattacggttatgcgcgtgcccgctggtactgcaaagaatgtgcagaaagcgttacggcttggggccgcgaatacatcgaaatgtctatccgtgaaatcgaagaaaagtacggtttcaaggtgctgtacgctgataccgacggcttccatgcgacgattccgggtgaagatgccgaaaccatcaaaaagaaagcaatggaattcctgaagtacatcaactcaaagctgccgggcgccctggaactggaatatgaaggcttctaccgtcgcggctttttcgttacgaagaaaaagtacgcagtcattgacgaagaaggcaaaatcaccacgcgcggtctggaaattgtgcgtcgcgattggagtgaaattgccaaagaaacccaggcacgtgtgctggaagctctgctgaaagatggcaatgttgaagaagcggtttccattgtcaaagaagtgacggaaaagctgggtaaatatgaagtcccgccggaaaaactggtgatccatgaacaaattacccgcgaactgaaggattacaaagcgacgggcccgcacgttgctatcgcgaaacgtctggcagcgcgtggcgtgaagattcgtccgggtaccgttatcagctatattgtcctgaaaggctctggtcgtatcggtgaccgcgcgattccgtttgatgaattcgacccgacgaaacatcgctacgatgcagaatattacatcgaaaaccaggttctgccggctgtcgaacgtattctgaaagcgtttggctatcgtgccgaagatctgcgctaccagaaaacccgtcaagtgggcctgggtgtttggctgcaaccgaaaggtaagaaataa

SEQ ID NO: 380 - DNA, 2325 bp, Artificial Sequence
  Synthetic
atgatcctggatgcggactacattaccgaagacggcaaaccggtcgtgcgtatcttcaaaaaagaaaacggcgaattcaaaatcgaatatgatcgcaactttgaaccgtatatctacgctctgctgaaagatgactccgcgatcgaagaagtgaagaaaattaccgccgaacgccatggcaaagtggttcgtgtcaaacgcgcagaaaaagtgaagaaaaaatttctgggtcgtccgattgaagtttggaaactgtatttcgaacatccgcaggatgtcccggctatccgtgacaaaattcgcgaacacccggcggtcgtggatatctatgaatacgacattccgtttgctaaacgttatctgatcgataaaggcctgattccgatggaaggtgacgaagaactgaaaatgctggcctttgatattgaaaccctgtatcacgaaggcgaagaattcggcaaaggtccgatcctgatgatttcatacgcagacgaagaagaagcgcgtgtgatcacctggaagaaaattgatctgccgtatgttgaagttgtctcgacggaacgtgaaatgatcaaacgttttctgcgcgtcattaaagaaaaagatccggacgtgctgatcacctataacggcgataattttgacttcgcatacctgaaaaaacgctgcgaaaaactgggtatcaaattcacgctgggccgtgatggtagcgaaccgaaaattcaacgtatgggcgatcgctttgcggtggacgttaaaggtcgcattcatttcgatctgtatccggttatccgtcgcaccattaatctgccgacctatacgctggaagcggtttacgaagccatctttggcaaaccgaaagaaaaagtgtacgccgaagaaattgcagaagcttgggaaaccggcgaaggtctggaacgtgtggcccgctattcaatggaagatgcaaaagttacgtacgaactgggtcgtgaatttttcccgatggaagcgcagctgagccgcctgattggccaaccgctgtgggatgtttctcgtagctctaccggtaacctggtcgaatggttcctgctgcgtaaagcgtatgaacgcaacgaactggcaccgaataaaccgtccggccgcgaatacgatgaacgtcgcggcggttatgcgggcggttacgttaaagaaccggaaaagggtctgtgggaaaacatcgtctacctggattacaagagtctgtatccgtccattatcattacccataacgttagtccggacacgctgaatcgcgaaggctgcaaagaatacgatgtggcgccgcaggttggtcaccgtttttgtaaagactttccgggcttcattccgtccctgctgggtgatctgctggaagaacgtcagaaaatcaagcgcaaaatgaaggccaccattgatccgatcgaacgtcgcctgctggactatcgtcaacgcgcgatcaaaattctggccaacagctattacggctattacggttatgcgcgtgcccgctggtactgcaaagaatgtgcagaaagcgttacggcttggggccgcgaatacatcgaaatgtctatccgtgaaatcgaagaaaagtacggtttcaaggtgctgtacgctgataccgacggcttccatgcgacgattccgggtgaagatgccgaaaccatcaaaaagaaagcaatggaattcctgaagtacatcaactcaaagctgccgggcgccctggaactggaatatgaaggcttctaccgtcgcggctttttcgttacgaagaaaaagtacgcagtcattgacgaagaaggcaaaatcaccacgcgcggtctggaaattgtgcgtcgcgattggagtgaaattgccaaagaaacccaggcaaaggttctggaagcaattctgaaacatggtaacgtcgaagaagcggtcaagatcgtgaaagaagttaccgaaaaactgtcgaattatgaaattccggtcgaaaagctggtgatctacgaacaaattacgcgcccgctgaacgaatataaagccattggcccgcacgtggcagttgctaaacgtctggcggccaagggtatcaagattaaaccgggcatggtgattggttatgttgtcctgcgcggcgatggtccgatcagcaaacgtgcgatcgccatcgaagaattcgatggcaaaaagcataagtacgacgcagaatactacatcgaaaatcaggttctgccggccgtcgaacgtatcctgaaagcattcggttataagcgtgaagatctgcgctggcagaagaccaaacaagtgggcctgggtgcgtggctgaaagttaaaaagtcttaa

SEQ ID NO: 381 - DNA, 2328 bp, Artificial Sequence
  Synthetic
atgatcctggatgcggactacattaccgaagacggcaaaccggtcgtgcgtatcttcaaaaaagaaaacggcgaattcaaaatcgaatatgatcgcaactttgaaccgtatatctacgctctgctgaaagatgactccgcgatcgaagaagtgaagaaaattaccgccgaacgccatggcaaagtggttcgtgtcaaacgcgcagaaaaagtgaagaaaaaatttctgggtcgtccgattgaagtttggaaactgtatttcgaacatccgcaggatgtcccggctatccgtgacaaaattcgcgaacacccggcggtcgtggatatctatgaatacgacattccgtttgctaaacgttatctgatcgataaaggcctgattccgatggaaggtgacgaagaactgaaaatgctggcctttgatattgaaaccctgtatcacgaaggcgaagaattcggcaaaggtccgatcctgatgatttcatacgcagacgaagaagaagcgcgtgtgatcacctggaagaaaattgatctgccgtatgttgaagttgtctcgacggaacgtgaaatgatcaaacgttttctgcgcgtcattaaagaaaaagatccggacgtgctgatcacctataacggcgataattttgacttcgcatacctgaaaaaacgctgcgaaaaactgggtatcaaattcacgctgggccgtgatggtagcgaaccgaaaattcaacgtatgggcgatcgctttgcggtggacgttaaaggtcgcattcatttcgatctgtatccggttatccgtcgcaccattaatctgccgacctatacgctggaagcggtttacgaagccatctttggcaaaccgaaagaaaaagtgtacgccgaagaaattgcagaagcttgggaaaccggcgaaggtctggaacgtgtggcccgctattcaatggaagatgcaaaagttacgtacgaactgggtcgtgaatttttcccgatggaagcgcagctgagccgcctgattggccaaccgctgtgggatgtttctcgtagctctaccggtaacctggtcgaatggttcctgctgcgtaaagcgtatgaacgcaacgaactggcaccgaataaaccgtccggccgcgaatacgatgaacgtcgcggcggttatgcgggcggttacgttaaagaaccggaaaagggtctgtgggaaaacatcgtctacctggattacaagagtctgtatccgtccattatcattacccataacgttagtccggacacgctgaatcgcgaaggctgcaaagaatacgatgtggcgccgcaggttggtcaccgtttttgtaaagactttccgggcttcattccgtccctgctgggtgatctgctggaagaacgtcagaaaatcaagcgcaaaatgaaggccaccattgatccgatcgaacgtcgcctgctggactatcgtcaacgcgcgatcaaaattctggccaacagctattacggctattacggttatgcgcgtgcccgctggtactgcaaagaatgtgcagaaagcgttacggcttggggccgcgaatacatcgaaatgtctatccgtgaaatcgaagaaaagtacggtttcaaggtgctgtacgctgataccgacggcttccatgcgacgattccgggtgaagatgccgaaaccatcaaaaagaaagcaatggaattcctgaagtacatcaactcaaagctgccgggcgccctggaactggaatatgaaggcttctaccgtcgcggctttttcgttacgaagaaaaagtacgcagtcattgacgaagaaggcaaaatcaccacgcgcggtctggaaattgtgcgtcgcgattggagtgaaattgccaaagaaacccaggcacgtgttctggaagcactgctgaaagatggtaatgtcgaagaagcagtgagtattgttaaagaagtcacggaaaaactgtccaagtatgaagtcccgccggaaaaactggtgattcatgaacaaatcacccgcgaactgaaagattacaaggcgacgggcccgcacgtggcaattgctaaacgtctggcagcgcgtggcgttaagatccgtccgggtaccgttattagctatatcgtcctgaaaggctctggtcgtattggtgaccgcgccatcccgtttgatgaattcgacccggctaaacaccgctacgatgcggaatattacattgaaaatcaggtcctgccggctgtggaacgtatcctgaaagcgtttggctatcgtaaggaagatctgcgctaccagaaaacccgtcaagtgggcctgggtgcgtggctgaaaccgaagggtaaaaagtaa

SEQ ID NO: 382 - DNA, 2328 bp, Artificial Sequence
  Synthetic
atgatcctggatgcggactacattaccgaagacggcaaaccggtcgtgcgtatcttcaaaaaagaaaacggcgaattcaaaatcgaatatgatcgcaactttgaaccgtatatctacgctctgctgaaagatgactccgcgatcgaagaagtgaagaaaattaccgccgaacgccatggcaaagtggttcgtgtcaaacgcgcagaaaaagtgaagaaaaaatttctgggtcgtccgattgaagtttggaaactgtatttcgaacatccgcaggatgtcccggctatccgtgacaaaattcgcgaacacccggcggtcgtggatatctatgaatacgacattccgtttgctaaacgttatctgatcgataaaggcctgattccgatggaaggtgacgaagaactgaaaatgctggcctttgatattgaaaccctgtatcacgaaggcgaagaattcggcaaaggtccgatcctgatgatttcatacgcagacgaagaagaagcgcgtgtgatcacctggaagaaaattgatctgccgtatgttgaagttgtctcgacggaacgtgaaatgatcaaacgttttctgcgcgtcattaaagaaaaagatccggacgtgctgatcacctataacggcgataattttgacttcgcatacctgaaaaaacgctgcgaaaaactgggtatcaaattcacgctgggccgtgatggtagcgaaccgaaaattcaacgtatgggcgatcgctttgcggtggacgttaaaggtcgcattcatttcgatctgtatccggttatccgtcgcaccattaatctgccgacctatacgctggaagcggtttacgaagccatctttggcaaaccgaaagaaaaagtgtacgccgaagaaattgcagaagcttgggaaaccggcgaaggtctggaacgtgtggcccgctattcaatggaagatgcaaaagttacgtacgaactgggtcgtgaatttttcccgatggaagcgcagctgagccgcctgattggccaaccgctgtgggatgtttctcgtagctctaccggtaacctggtcgaatggttcctgctgcgtaaagcgtatgaacgcaacgaactggcaccgaataaaccgtccggccgcgaatacgatgaacgtcgcggcggttatgcgggcggttacgttaaagaaccggaaaagggtctgtgggaaaacatcgtctacctggattacaagagtctgtatccgtccattatcattacccataacgttagtccggacacgctgaatcgcgaaggctgcaaagaatacgatgtggcgccgcaggttggtcaccgtttttgtaaagactttccgggcttcattccgtccctgctgggtgatctgctggaagaacgtcagaaaatcaagcgcaaaatgaaggccaccattgatccgatcgaacgtcgcctgctggactatcgtcaacgcgcgatcaaaattctggccaacagctattacggctattacggttatgcgcgtgcccgctggtactgcaaagaatgtgcagaaagcgttacggcttggggccgcgaatacatcgaaatgtctatccgtgaaatcgaagaaaagtacggtttcaaggtgctgtacgctgataccgacggcttccatgcgacgattccgggtgaagatgccgaaaccatcaaaaagaaagcaatggaattcctgaagtacatcaactcaaagctgccgggcgccctggaactggaatatgaaggcttctaccgtcgcggctttttcgttacgaagaaaaagtacgcagtcattgacgaagaaggcaaaatcaccacgcgcggtctggaaattgtgcgtcgcgattggagtgaaattgccaaagaaacccaggcacgcgtcctggaagcaatcctgaaagatggtgacgtggaagaagccgtccgtattgtgaaagaagttacggaaaaactgtccaaatatgaagttccgccggaaaaactggtcatccatgaacaaattacccgcgaactgaaagattacaaagcgacgggcccgcacgtcgcaatcgctaaacgtctggcggcgcgtggcgtgaaaattcgtccgggtaccgtgatctcatatattgttctgaaaggctcgggtcgtatcggtgaccgcgctattccgtttgatgaattcgacccgaaaaaacacaaatacgatgcggaatactacatcgaaaaccaggttctgccggccgtcgaacgtattctgcgcgcatttggctaccgtaaagaagatctgcgttatcaaaaaaccaaacaagtgggtctgggtgcgtggctgaaaccgaaaggtaaaaaataa

SEQ ID NO: 383 - DNA, 2325 bp, Artificial Sequence
  Synthetic
atgatcctggatgcggactacattaccgaagacggcaaaccggtcgtgcgtatcttcaaaaaagaaaacggcgaattcaaaatcgaatatgatcgcaactttgaaccgtatatctacgctctgctgaaagatgactccgcgatcgaagaagtgaagaaaattaccgccgaacgccatggcaaagtggttcgtgtcaaacgcgcagaaaaagtgaagaaaaaatttctgggtcgtccgattgaagtttggaaactgtatttcgaacatccgcaggatgtcccggctatccgtgacaaaattcgcgaacacccggcggtcgtggatatctatgaatacgacattccgtttgctaaacgttatctgatcgataaaggcctgattccgatggaaggtgacgaagaactgaaaatgctggcctttgatattgaaaccctgtatcacgaaggcgaagaattcggcaaaggtccgatcctgatgatttcatacgcagacgaagaagaagcgcgtgtgatcacctggaagaaaattgatctgccgtatgttgaagttgtctcgacggaacgtgaaatgatcaaacgttttctgcgcgtcattaaagaaaaagatccggacgtgctgatcacctataacggcgataattttgacttcgcatacctgaaaaaacgctgcgaaaaactgggtatcaaattcacgctgggccgtgatggtagcgaaccgaaaattcaacgtatgggcgatcgctttgcggtggacgttaaaggtcgcattcatttcgatctgtatccggttatccgtcgcaccattaatctgccgacctatacgctggaagcggtttacgaagccatctttggcaaaccgaaagaaaaagtgtacgccgaagaaattgcagaagcttgggaaaccggcgaaggtctggaacgtgtggcccgctattcaatggaagatgcaaaagttacgtacgaactgggtcgtgaatttttcccgatggaagcgcagctgagccgcctgattggccaaccgctgtgggatgtttctcgtagctctaccggtaacctggtcgaatggttcctgctgcgtaaagcgtatgaacgcaacgaactggcaccgaataaaccgtccggccgcgaatacgatgaacgtcgcggcggttatgcgggcggttacgttaaagaaccggaaaagggtctgtgggaaaacatcgtctacctggattacaagagtctgtatccgtccattatcattacccataacgttagtccggacacgctgaatcgcgaaggctgcaaagaatacgatgtggcgccgcaggttggtcaccgtttttgtaaagactttccgggcttcattccgtccctgctgggtgatctgctggaagaacgtcagaaaatcaagcgcaaaatgaaggccaccattgatccgatcgaacgtcgcctgctggactatcgtcaacgcgcgatcaaaattctggccaacagctattacggctattacggttatgcgcgtgcccgctggtactgcaaagaatgtgcagaaagcgttacggcttggggccgcgaatacatcgaaatgtctatccgtgaaatcgaagaaaagtacggtttcaaggtgctgtacgctgataccgacggcttccatgcgacgattccgggtgaagatgccgaaaccatcaaaaagaaagcaatggaattcctgaagtacatcaactcaaagctgccgggcgccctggaactggaatatgaaggcttctaccgtcgcggctttttcgttacgaagaaaaagtacgcagtcattgacgaagaaggcaaaatcaccacgcgcggtctggaaattgtgcgtcgcgattggagtgaaattgccaaagaaacccaggcacgtgttctggaagcaattctgaaacatggtaacgtcgaagaagcggtcaaaatcgtgaaagaagttacggaaaaactgtctaactacgaaattccgccggaaaaactggccatctacgaacaaattacccgcccgctgcatgaatataaagcaatcggtccgcacgtcgcagtggcaaaacgtctggcagcacgcggcgttaaagtcaaaccgggtatggtcatcggctatattgtgctgcgtggtgatggcccgatcagcaaccgcgcaattctggctgaagaatacgatctgaaaaaacacaaatacgacgccgaatattacatcgaaaatcaggttctgccggctgtcctgcgtattctggaagcgtttggctatcgtaaagaagatctgcgctggcagaaaacccgtcaaacgggtctgacctcatggctgaatattaaaaaatcgtaa

SEQ ID NO: 384 - DNA, 2325 bp, Artificial Sequence
  Synthetic
atgatcctggatgcggactacattaccgaagacggcaaaccggtcgtgcgtatcttcaaaaaagaaaacggcgaattcaaaatcgaatatgatcgcaactttgaaccgtatatctacgctctgctgaaagatgactccgcgatcgaagaagtgaagaaaattaccgccgaacgccatggcaaagtggttcgtgtcaaacgcgcagaaaaagtgaagaaaaaatttctgggtcgtccgattgaagtttggaaactgtatttcgaacatccgcaggatgtcccggctatccgtgacaaaattcgcgaacacccggcggtcgtggatatctatgaatacgacattccgtttgctaaacgttatctgatcgataaaggcctgattccgatggaaggtgacgaagaactgaaaatgctggcctttgatattgaaaccctgtatcacgaaggcgaagaattcggcaaaggtccgatcctgatgatttcatacgcagacgaagaagaagcgcgtgtgatcacctggaagaaaattgatctgccgtatgttgaagttgtctcgacggaacgtgaaatgatcaaacgttttctgcgcgtcattaaagaaaaagatccggacgtgctgatcacctataacggcgataattttgacttcgcatacctgaaaaaacgctgcgaaaaactgggtatcaaattcacgctgggccgtgatggtagcgaaccgaaaattcaacgtatgggcgatcgctttgcggtggacgttaaaggtcgcattcatttcgatctgtatccggttatccgtcgcaccattaatctgccgacctatacgctggaagcggtttacgaagccatctttggcaaaccgaaagaaaaagtgtacgccgaagaaattgcagaagcttgggaaaccggcgaaggtctggaacgtgtggcccgctattcaatggaagatgcaaaagttacgtacgaactgggtcgtgaatttttcccgatggaagcgcagctgagccgcctgattggccaaccgctgtgggatgtttctcgtagctctaccggtaacctggtcgaatggttcctgctgcgtaaagcgtatgaacgcaacgaactggcaccgaataaaccgtccggccgcgaatacgatgaacgtcgcggcggttatgcgggcggttacgttaaagaaccggaaaagggtctgtgggaaaacatcgtctacctggattacaagagtctgtatccgtccattatcattacccataacgttagtccggacacgctgaatcgcgaaggctgcaaagaatacgatgtggcgccgcaggttggtcaccgtttttgtaaagactttccgggcttcattccgtccctgctgggtgatctgctggaagaacgtcagaaaatcaagcgcaaaatgaaggccaccattgatccgatcgaacgtcgcctgctggactatcgtcaacgcgcgatcaaaattctggccaacagctattacggctattacggttatgcgcgtgcccgctggtactgcaaagaatgtgcagaaagcgttacggcttggggccgcgaatacatcgaaatgtctatccgtgaaatcgaagaaaagtacggtttcaaggtgctgtacgctgataccgacggcttccatgcgacgattccgggtgaagatgccgaaaccatcaaaaagaaagcaatggaattcctgaagtacatcaactcaaagctgccgggcgccctggaactggaatatgaaggcttctaccgtcgcggctttttcgttacgaagaaaaagtacgcagtcattgacgaagaaggcaaaatcaccacgcgcggtctggaaattgtgcgtcgcgattggagtgaaattgccaaagaaacccaggcaaaagttctggaagcaatcctgaaacatggtaatgtcgaagaagcagtgaaaattgtcaaggaagtgacggaaaaactgtcgaagtatgaaatcccgccggaaaaactggtgatctacgaacaaattacccgcccgctgcatgaatataaagcgattggcccgcacgtggcagttgctaaacgtctggcagcccgcggtgtcaaagtgcgtccgggcatggtgatcggttatattgttctgcgtggcgatggtccgatcagtaaacgcgcgattctggccgaagaatttgatccgcgcaaacacaagtacgacgccgaatattacatcgaaaaccaggtgctgccggctgttctgcgtattctggaagcgttcggctatcgtaaagaagatctgcgctggcagaaaaccaagcaaacgggtctgaccgcatggctgaatgtgaaaaagaaataa

SEQ ID NO: 385 - DNA, 2331 bp, Artificial Sequence
  Synthetic
atgatcctggatgcggactacattaccgaagacggcaaaccggtcgtgcgtatcttcaaaaaagaaaacggcgaattcaaaatcgaatatgatcgcaactttgaaccgtatatctacgctctgctgaaagatgactccgcgatcgaagaagtgaagaaaattaccgccgaacgccatggcaaagtggttcgtgtcaaacgcgcagaaaaagtgaagaaaaaatttctgggtcgtccgattgaagtttggaaactgtatttcgaacatccgcaggatgtcccggctatccgtgacaaaattcgcgaacacccggcggtcgtggatatctatgaatacgacattccgtttgctaaacgttatctgatcgataaaggcctgattccgatggaaggtgacgaagaactgaaaatgctggcctttgatattgaaaccctgtatcacgaaggcgaagaattcggcaaaggtccgatcctgatgatttcatacgcagacgaagaagaagcgcgtgtgatcacctggaagaaaattgatctgccgtatgttgaagttgtctcgacggaacgtgaaatgatcaaacgttttctgcgcgtcattaaagaaaaagatccggacgtgctgatcacctataacggcgataattttgacttcgcatacctgaaaaaacgctgcgaaaaactgggtatcaaattcacgctgggccgtgatggtagcgaaccgaaaattcaacgtatgggcgatcgctttgcggtggacgttaaaggtcgcattcatttcgatctgtatccggttatccgtcgcaccattaatctgccgacctatacgctggaagcggtttacgaagccatctttggcaaaccgaaagaaaaagtgtacgccgaagaaattgcagaagcttgggaaaccggcgaaggtctggaacgtgtggcccgctattcaatggaagatgcaaaagttacgtacgaactgggtcgtgaatttttcccgatggaagcgcagctgagccgcctgattggccaaccgctgtgggatgtttctcgtagctctaccggtaacctggtcgaatggttcctgctgcgtaaagcgtatgaacgcaacgaactggcgccgaataaaccggatgaacgcgaatatgaacgtcgcctgcgtgaaagttatgaaggcggttacgttaaagaaccggaacgcggcctgtgggaaggtattgtgtcactggattttcgtagtctgtacccgtccattatcattacccataacgtttcgccggatacgctgaataaagaaggctgcggtgaatatgacgaagccccggaagtgggtcaccgcttctgtaaagattttccgggcttcattccgtcactgctgggttcgctgctggaagaacgccagaagatcaagaaacgtatgaaggaatctaaggatccggtggaacgcaaactgctggactatcgtcaacgcgcgatcaagattctggccaacagcttttatggctattacggttacgcgaaagcccgttggtactgcaaggaatgtgcagaaagcgtgaccgcttggggccgccagtatattgaactggtccgtcgcgaactggaagaacgtggttttaaagtgctgtatatcgataccgacggcctgtacgccacgattccgggtgaaaagaactgggaagaaatcaagcgtcgcgcactggaatttgttaactacatcaattccaaactgccgggcattctggaactggaatatgaaggcttctacacccgtggctttttcgtgacgaagaaaaagtatgcgctgatcgatgaagaaggcaaaattgtcacccgtggtctggaaatcgtgcgtcgcgattggagtgaaattgccaaagaaacccaggcacgcgttctggaagcaatcctgcgtcatggtgacgtcgaagaagccgttcgcattgtcaaagatgtgacggaaaagctgtcgaaatatgaagtcccgccggaaaaactggtgatccatgaacaaattacccgtgaactgaaggattacaaagcgacgggcccgcacgttgcaattgctaaacgcctggcagcccgtggcatcaagattcgtccgggtaccgttatcagctatattgtcctgaaaggctctggtcgcatcggtgatcgtgctattccgtttgatgaattcgacccgacgaaacaccgttacgatgccgaatattacatcgaaaatcaggtgctgccggccgttgaacgcattctgaaagcatttggctataagaaagaagaactgcgctaccagaaaacccgtcaagtgggcctgggtgcgtggctgaagctgaaaggtaagaaataa

SEQ ID NO: 386 - DNA, 2325 bp, Artificial Sequence
  Synthetic
atgatcctggatgcggactacattaccgaagacggcaaaccggtcgtgcgtatcttcaaaaaagaaaacggcgaattcaaaatcgaatatgatcgcaactttgaaccgtatatctacgctctgctgaaagatgactccgcgatcgaagaagtgaagaaaattaccgccgaacgccatggcaaagtggttcgtgtcaaacgcgcagaaaaagtgaagaaaaaatttctgggtcgtccgattgaagtttggaaactgtatttcgaacatccgcaggatgtcccggctatccgtgacaaaattcgcgaacacccggcggtcgtggatatctatgaatacgacattccgtttgctaaacgttatctgatcgataaaggcctgattccgatggaaggtgacgaagaactgaaaatgctggcctttgatattgaaaccctgtatcacgaaggcgaagaattcggcaaaggtccgatcctgatgatttcatacgcagacgaagaagaagcgcgtgtgatcacctggaagaaaattgatctgccgtatgttgaagttgtctcgacggaacgtgaaatgatcaaacgttttctgcgcgtcattaaagaaaaagatccggacgtgctgatcacctataacggcgataattttgacttcgcatacctgaaaaaacgctgcgaaaaactgggtatcaaattcacgctgggccgtgatggtagcgaaccgaaaattcaacgtatgggcgatcgctttgcggtggacgttaaaggtcgcattcatttcgatctgtatccggttatccgtcgcaccattaatctgccgacctatacgctggaagcggtttacgaagccatctttggcaaaccgaaagaaaaagtgtacgccgaagaaattgcagaagcttgggaaaccggcgaaggtctggaacgtgtggcccgctattcaatggaagatgcaaaagttacgtacgaactgggtcgtgaatttttcccgatggaagcgcagctgagccgcctgattggccaaccgctgtgggatgtttctcgtagctctaccggtaacctggtcgaatggttcctgctgcgtaaagcgtatgaacgcaacgaactggcgccgaataaaccggatgaacgcgaatatgaacgtcgcctgcgtgaaagttatgaaggcggttacgttaaagaaccggaacgcggcctgtgggaaggtattgtgtcactggattttcgtagtctgtacccgtccattatcattacccataacgtttcgccggatacgctgaataaagaaggctgcggtgaatatgacgaagccccggaagtgggtcaccgcttctgtaaagattttccgggcttcattccgtcactgctgggttcgctgctggaagaacgccagaagatcaagaaacgtatgaaggaatctaaggatccggtggaacgcaaactgctggactatcgtcaacgcgcgatcaagattctggccaacagcttttatggctattacggttacgcgaaagcccgttggtactgcaaggaatgtgcagaaagcgtgaccgcttggggccgccagtatattgaactggtccgtcgcgaactggaagaacgtggttttaaagtgctgtatatcgataccgacggcctgtacgccacgattccgggtgaaaagaactgggaagaaatcaagcgtcgcgcactggaatttgttaactacatcaattccaaactgccgggcattctggaactggaatatgaaggcttctacacccgtggctttttcgtgacgaagaaaaagtatgcgctgatcgatgaagaaggcaaaattgtcacccgtggtctggaaatcgtgcgtcgcgattggagtgaaattgccaaagaaacccaggcacgtgtcctggaagcaatcctgaaacatggtgatgtggaagaagcggttcgcattgtcaaagaagtgacggaaaagctgtcgaaatatgaagttccgccggaaaaactggtcatccatgaacaaattacccgcgatctgcgtgactacaaagccacgggtccgcacgtggcagttgcaaaacgtctggcagcccgtggcgtgaagattcgtccgggtaccgtgatcagttatattgttctgaaaggctccggtcgcatcggtgaccgtgctattccgtttgatgaattcgacccgacgaaacaccgttacgatgccgaatattacatcgaaaatcaggtcctgccggccgtggaacgcattctgaaagcatttggttatcgcaaggaagatctgcgttaccagaagaccaaacaagtcggcctgggtgcgtggctgaaagtgaaaaagtaa

SEQ ID NO: 387 - DNA, 2331 bp, Artificial Sequence
  Synthetic
atgatcctggatgcggactacattaccgaagacggcaaaccggtcgtgcgtatcttcaaaaaagaaaacggcgaattcaaaatcgaatatgatcgcaactttgaaccgtatatctacgctctgctgaaagatgactccgcgatcgaagaagtgaagaaaattaccgccgaacgccatggcaaagtggttcgtgtcaaacgcgcagaaaaagtgaagaaaaaatttctgggtcgtccgattgaagtttggaaactgtatttcgaacatccgcaggatgtcccggctatccgtgacaaaattcgcgaacacccggcggtcgtggatatctatgaatacgacattccgtttgctaaacgttatctgatcgataaaggcctgattccgatggaaggtgacgaagaactgaaaatgctggcctttgatattgaaaccctgtatcacgaaggcgaagaattcggcaaaggtccgatcctgatgatttcatacgcagacgaagaagaagcgcgtgtgatcacctggaagaaaattgatctgccgtatgttgaagttgtctcgacggaacgtgaaatgatcaaacgttttctgcgcgtcattaaagaaaaagatccggacgtgctgatcacctataacggcgataattttgacttcgcatacctgaaaaaacgctgcgaaaaactgggtatcaaattcacgctgggccgtgatggtagcgaaccgaaaattcaacgtatgggcgatcgctttgcggtggacgttaaaggtcgcattcatttcgatctgtatccggttatccgtcgcaccattaatctgccgacctatacgctggaagcggtttacgaagccatctttggcaaaccgaaagaaaaagtgtacgccgaagaaattgcagaagcttgggaaaccggcgaaggtctggaacgtgtggcccgctattcaatggaagatgcaaaagttacgtacgaactgggtcgtgaatttttcccgatggaagcgcagctgagccgcctgattggccaaccgctgtgggatgtttctcgtagctctaccggtaacctggtcgaatggttcctgctgcgtaaagcgtatgaacgcaacgaactggcgccgaataaaccggatgaacgcgaatatgaacgtcgcctgcgtgaaagttatgaaggcggttacgttaaagaaccggaacgcggcctgtgggaaggtattgtgtcactggattttcgtagtctgtacccgtccattatcattacccataacgtttcgccggatacgctgaataaagaaggctgcggtgaatatgacgaagccccggaagtgggtcaccgcttctgtaaagattttccgggcttcattccgtcactgctgggttcgctgctggaagaacgccagaagatcaagaaacgtatgaaggaatctaaggatccggtggaacgcaaactgctggactatcgtcaacgcgcgatcaagattctggccaacagcttttatggctattacggttacgcgaaagcccgttggtactgcaaggaatgtgcagaaagcgtgaccgcttggggccgccagtatattgaactggtccgtcgcgaactggaagaacgtggttttaaagtgctgtatatcgataccgacggcctgtacgccacgattccgggtgaaaagaactgggaagaaatcaagcgtcgcgcactggaatttgttaactacatcaattccaaactgccgggcattctggaactggaatatgaaggcttctacacccgtggctttttcgtgacgaagaaaaagtatgcgctgatcgatgaagaaggcaaaattgtcacccgtggtctggaaatcgtgcgtcgcgattggagtgaaattgccaaagaaacccaggcacgtgtgctggaagctctgctgaaagatggcaatgttgaagaagcggtttccattgtcaaagaagtgacggaaaagctgggtaaatatgaagtcccgccggaaaaactggtgatccatgaacaaattacccgcgaactgaaggattacaaagcgacgggcccgcacgttgctatcgcgaaacgtctggcagcgcgtggcgtgaagattcgtccgggtaccgttatcagctatattgtcctgaaaggctctggtcgtatcggtgaccgcgcgattccgtttgatgaattcgacccgacgaaacatcgctacgatgcagaatattacatcgaaaaccaggttctgccggctgtcgaacgtattctgaaagcgtttggctatcgtgccgaagatctgcgctaccagaaaacccgtcaagtgggcctgggtgtttggctgcaaccgaaaggtaagaaataa

SEQ ID NO: 388 - DNA, 2328 bp, Artificial Sequence
  Synthetic
atgatcctggatgcggactacattaccgaagacggcaaaccggtcgtgcgtatcttcaaaaaagaaaacggcgaattcaaaatcgaatatgatcgcaactttgaaccgtatatctacgctctgctgaaagatgactccgcgatcgaagaagtgaagaaaattaccgccgaacgccatggcaaagtggttcgtgtcaaacgcgcagaaaaagtgaagaaaaaatttctgggtcgtccgattgaagtttggaaactgtatttcgaacatccgcaggatgtcccggctatccgtgacaaaattcgcgaacacccggcggtcgtggatatctatgaatacgacattccgtttgctaaacgttatctgatcgataaaggcctgattccgatggaaggtgacgaagaactgaaaatgctggcctttgatattgaaaccctgtatcacgaaggcgaagaattcggcaaaggtccgatcctgatgatttcatacgcagacgaagaagaagcgcgtgtgatcacctggaagaaaattgatctgccgtatgttgaagttgtctcgacggaacgtgaaatgatcaaacgttttctgcgcgtcattaaagaaaaagatccggacgtgctgatcacctataacggcgataattttgacttcgcatacctgaaaaaacgctgcgaaaaactgggtatcaaattcacgctgggccgtgatggtagcgaaccgaaaattcaacgtatgggcgatcgctttgcggtggacgttaaaggtcgcattcatttcgatctgtatccggttatccgtcgcaccattaatctgccgacctatacgctggaagcggtttacgaagccatctttggcaaaccgaaagaaaaagtgtacgccgaagaaattgcagaagcttgggaaaccggcgaaggtctggaacgtgtggcccgctattcaatggaagatgcaaaagttacgtacgaactgggtcgtgaatttttcccgatggaagcgcagctgagccgcctgattggccaaccgctgtgggatgtttctcgtagctctaccggtaacctggtcgaatggttcctgctgcgtaaagcgtatgaacgcaacgaactggcgccgaataaaccggatgaacgcgaatatgaacgtcgcctgcgtgaaagttatgaaggcggttacgttaaagaaccggaacgcggcctgtgggaaggtattgtgtcactggattttcgtagtctgtacccgtccattatcattacccataacgtttcgccggatacgctgaataaagaaggctgcggtgaatatgacgaagccccggaagtgggtcaccgcttctgtaaagattttccgggcttcattccgtcactgctgggttcgctgctggaagaacgccagaagatcaagaaacgtatgaaggaatctaaggatccggtggaacgcaaactgctggactatcgtcaacgcgcgatcaagattctggccaacagcttttatggctattacggttacgcgaaagcccgttggtactgcaaggaatgtgcagaaagcgtgaccgcttggggccgccagtatattgaactggtccgtcgcgaactggaagaacgtggttttaaagtgctgtatatcgataccgacggcctgtacgccacgattccgggtgaaaagaactgggaagaaatcaagcgtcgcgcactggaatttgttaactacatcaattccaaactgccgggcattctggaactggaatatgaaggcttctacacccgtggctttttcgtgacgaagaaaaagtatgcgctgatcgatgaagaaggcaaaattgtcacccgtggtctggaaatcgtgcgtcgcgattggagtgaaattgccaaagaaacccaggcaaaggttctggaagcaattctgaaacatggtaacgtcgaagaagcggtcaagatcgtgaaagaagttaccgaaaaactgtcgaattatgaaattccggtcgaaaagctggtgatctacgaacaaattacgcgcccgctgaacgaatataaagccattggcccgcacgtggcagttgctaaacgtctggcggccaagggtatcaagattaaaccgggcatggtgattggttatgttgtcctgcgcggcgatggtccgatcagcaaacgtgcgatcgccatcgaagaattcgatggcaaaaagcataagtacgacgcagaatactacatcgaaaatcaggttctgccggccgtcgaacgtatcctgaaagcattcggttataagcgtgaagatctgcgctggcagaagaccaaacaagtgggcctgggtgcgtggctgaaagttaaaaagtcttaa

SEQ ID NO: 389 - DNA, 2331 bp, Artificial Sequence
  Synthetic
atgatcctggatgcggactacattaccgaagacggcaaaccggtcgtgcgtatcttcaaaaaagaaaacggcgaattcaaaatcgaatatgatcgcaactttgaaccgtatatctacgctctgctgaaagatgactccgcgatcgaagaagtgaagaaaattaccgccgaacgccatggcaaagtggttcgtgtcaaacgcgcagaaaaagtgaagaaaaaatttctgggtcgtccgattgaagtttggaaactgtatttcgaacatccgcaggatgtcccggctatccgtgacaaaattcgcgaacacccggcggtcgtggatatctatgaatacgacattccgtttgctaaacgttatctgatcgataaaggcctgattccgatggaaggtgacgaagaactgaaaatgctggcctttgatattgaaaccctgtatcacgaaggcgaagaattcggcaaaggtccgatcctgatgatttcatacgcagacgaagaagaagcgcgtgtgatcacctggaagaaaattgatctgccgtatgttgaagttgtctcgacggaacgtgaaatgatcaaacgttttctgcgcgtcattaaagaaaaagatccggacgtgctgatcacctataacggcgataattttgacttcgcatacctgaaaaaacgctgcgaaaaactgggtatcaaattcacgctgggccgtgatggtagcgaaccgaaaattcaacgtatgggcgatcgctttgcggtggacgttaaaggtcgcattcatttcgatctgtatccggttatccgtcgcaccattaatctgccgacctatacgctggaagcggtttacgaagccatctttggcaaaccgaaagaaaaagtgtacgccgaagaaattgcagaagcttgggaaaccggcgaaggtctggaacgtgtggcccgctattcaatggaagatgcaaaagttacgtacgaactgggtcgtgaatttttcccgatggaagcgcagctgagccgcctgattggccaaccgctgtgggatgtttctcgtagctctaccggtaacctggtcgaatggttcctgctgcgtaaagcgtatgaacgcaacgaactggcgccgaataaaccggatgaacgcgaatatgaacgtcgcctgcgtgaaagttatgaaggcggttacgttaaagaaccggaacgcggcctgtgggaaggtattgtgtcactggattttcgtagtctgtacccgtccattatcattacccataacgtttcgccggatacgctgaataaagaaggctgcggtgaatatgacgaagccccggaagtgggtcaccgcttctgtaaagattttccgggcttcattccgtcactgctgggttcgctgctggaagaacgccagaagatcaagaaacgtatgaaggaatctaaggatccggtggaacgcaaactgctggactatcgtcaacgcgcgatcaagattctggccaacagcttttatggctattacggttacgcgaaagcccgttggtactgcaaggaatgtgcagaaagcgtgaccgcttggggccgccagtatattgaactggtccgtcgcgaactggaagaacgtggttttaaagtgctgtatatcgataccgacggcctgtacgccacgattccgggtgaaaagaactgggaagaaatcaagcgtcgcgcactggaatttgttaactacatcaattccaaactgccgggcattctggaactggaatatgaaggcttctacacccgtggctttttcgtgacgaagaaaaagtatgcgctgatcgatgaagaaggcaaaattgtcacccgtggtctggaaatcgtgcgtcgcgattggagtgaaattgccaaagaaacccaggcacgtgttctggaagcactgctgaaagatggtaatgtcgaagaagcagtgagtattgttaaagaagtcacggaaaaactgtccaagtatgaagtcccgccggaaaaactggtgattcatgaacaaatcacccgcgaactgaaagattacaaggcgacgggcccgcacgtggcaattgctaaacgtctggcagcgcgtggcgttaagatccgtccgggtaccgttattagctatatcgtcctgaaaggctctggtcgtattggtgaccgcgccatcccgtttgatgaattcgacccggctaaacaccgctacgatgcggaatattacattgaaaatcaggtcctgccggctgtggaacgtatcctgaaagcgtttggctatcgtaaggaagatctgcgctaccagaaaacccgtcaagtgggcctgggtgcgtggctgaaaccgaagggtaaaaagtaa

SEQ ID NO: 390 - DNA, 2331 bp, Artificial Sequence
  Synthetic
atgatcctggatgcggactacattaccgaagacggcaaaccggtcgtgcgtatcttcaaaaaagaaaacggcgaattcaaaatcgaatatgatcgcaactttgaaccgtatatctacgctctgctgaaagatgactccgcgatcgaagaagtgaagaaaattaccgccgaacgccatggcaaagtggttcgtgtcaaacgcgcagaaaaagtgaagaaaaaatttctgggtcgtccgattgaagtttggaaactgtatttcgaacatccgcaggatgtcccggctatccgtgacaaaattcgcgaacacccggcggtcgtggatatctatgaatacgacattccgtttgctaaacgttatctgatcgataaaggcctgattccgatggaaggtgacgaagaactgaaaatgctggcctttgatattgaaaccctgtatcacgaaggcgaagaattcggcaaaggtccgatcctgatgatttcatacgcagacgaagaagaagcgcgtgtgatcacctggaagaaaattgatctgccgtatgttgaagttgtctcgacggaacgtgaaatgatcaaacgttttctgcgcgtcattaaagaaaaagatccggacgtgctgatcacctataacggcgataattttgacttcgcatacctgaaaaaacgctgcgaaaaactgggtatcaaattcacgctgggccgtgatggtagcgaaccgaaaattcaacgtatgggcgatcgctttgcggtggacgttaaaggtcgcattcatttcgatctgtatccggttatccgtcgcaccattaatctgccgacctatacgctggaagcggtttacgaagccatctttggcaaaccgaaagaaaaagtgtacgccgaagaaattgcagaagcttgggaaaccggcgaaggtctggaacgtgtggcccgctattcaatggaagatgcaaaagttacgtacgaactgggtcgtgaatttttcccgatggaagcgcagctgagccgcctgattggccaaccgctgtgggatgtttctcgtagctctaccggtaacctggtcgaatggttcctgctgcgtaaagcgtatgaacgcaacgaactggcgccgaataaaccggatgaacgcgaatatgaacgtcgcctgcgtgaaagttatgaaggcggttacgttaaagaaccggaacgcggcctgtgggaaggtattgtgtcactggattttcgtagtctgtacccgtccattatcattacccataacgtttcgccggatacgctgaataaagaaggctgcggtgaatatgacgaagccccggaagtgggtcaccgcttctgtaaagattttccgggcttcattccgtcactgctgggttcgctgctggaagaacgccagaagatcaagaaacgtatgaaggaatctaaggatccggtggaacgcaaactgctggactatcgtcaacgcgcgatcaagattctggccaacagcttttatggctattacggttacgcgaaagcccgttggtactgcaaggaatgtgcagaaagcgtgaccgcttggggccgccagtatattgaactggtccgtcgcgaactggaagaacgtggttttaaagtgctgtatatcgataccgacggcctgtacgccacgattccgggtgaaaagaactgggaagaaatcaagcgtcgcgcactggaatttgttaactacatcaattccaaactgccgggcattctggaactggaatatgaaggcttctacacccgtggctttttcgtgacgaagaaaaagtatgcgctgatcgatgaagaaggcaaaattgtcacccgtggtctggaaatcgtgcgtcgcgattggagtgaaattgccaaagaaacccaggcacgcgtcctggaagcaatcctgaaagatggtgacgtggaagaagccgtccgtattgtgaaagaagttacggaaaaactgtccaaatatgaagttccgccggaaaaactggtcatccatgaacaaattacccgcgaactgaaagattacaaagcgacgggcccgcacgtcgcaatcgctaaacgtctggcggcgcgtggcgtgaaaattcgtccgggtaccgtgatctcatatattgttctgaaaggctcgggtcgtatcggtgaccgcgctattccgtttgatgaattcgacccgaaaaaacacaaatacgatgcggaatactacatcgaaaaccaggttctgccggccgtcgaacgtattctgcgcgcatttggctaccgtaaagaagatctgcgttatcaaaaaaccaaacaagtgggtctgggtgcgtggctgaaaccgaaaggtaaaaaataa

SEQ ID NO: 391 - DNA, 2328 bp, Artificial Sequence
  Synthetic
atgatcctggatgcggactacattaccgaagacggcaaaccggtcgtgcgtatcttcaaaaaagaaaacggcgaattcaaaatcgaatatgatcgcaactttgaaccgtatatctacgctctgctgaaagatgactccgcgatcgaagaagtgaagaaaattaccgccgaacgccatggcaaagtggttcgtgtcaaacgcgcagaaaaagtgaagaaaaaatttctgggtcgtccgattgaagtttggaaactgtatttcgaacatccgcaggatgtcccggctatccgtgacaaaattcgcgaacacccggcggtcgtggatatctatgaatacgacattccgtttgctaaacgttatctgatcgataaaggcctgattccgatggaaggtgacgaagaactgaaaatgctggcctttgatattgaaaccctgtatcacgaaggcgaagaattcggcaaaggtccgatcctgatgatttcatacgcagacgaagaagaagcgcgtgtgatcacctggaagaaaattgatctgccgtatgttgaagttgtctcgacggaacgtgaaatgatcaaacgttttctgcgcgtcattaaagaaaaagatccggacgtgctgatcacctataacggcgataattttgacttcgcatacctgaaaaaacgctgcgaaaaactgggtatcaaattcacgctgggccgtgatggtagcgaaccgaaaattcaacgtatgggcgatcgctttgcggtggacgttaaaggtcgcattcatttcgatctgtatccggttatccgtcgcaccattaatctgccgacctatacgctggaagcggtttacgaagccatctttggcaaaccgaaagaaaaagtgtacgccgaagaaattgcagaagcttgggaaaccggcgaaggtctggaacgtgtggcccgctattcaatggaagatgcaaaagttacgtacgaactgggtcgtgaatttttcccgatggaagcgcagctgagccgcctgattggccaaccgctgtgggatgtttctcgtagctctaccggtaacctggtcgaatggttcctgctgcgtaaagcgtatgaacgcaacgaactggcgccgaataaaccggatgaacgcgaatatgaacgtcgcctgcgtgaaagttatgaaggcggttacgttaaagaaccggaacgcggcctgtgggaaggtattgtgtcactggattttcgtagtctgtacccgtccattatcattacccataacgtttcgccggatacgctgaataaagaaggctgcggtgaatatgacgaagccccggaagtgggtcaccgcttctgtaaagattttccgggcttcattccgtcactgctgggttcgctgctggaagaacgccagaagatcaagaaacgtatgaaggaatctaaggatccggtggaacgcaaactgctggactatcgtcaacgcgcgatcaagattctggccaacagcttttatggctattacggttacgcgaaagcccgttggtactgcaaggaatgtgcagaaagcgtgaccgcttggggccgccagtatattgaactggtccgtcgcgaactggaagaacgtggttttaaagtgctgtatatcgataccgacggcctgtacgccacgattccgggtgaaaagaactgggaagaaatcaagcgtcgcgcactggaatttgttaactacatcaattccaaactgccgggcattctggaactggaatatgaaggcttctacacccgtggctttttcgtgacgaagaaaaagtatgcgctgatcgatgaagaaggcaaaattgtcacccgtggtctggaaatcgtgcgtcgcgattggagtgaaattgccaaagaaacccaggcacgtgttctggaagcaattctgaaacatggtaacgtcgaagaagcggtcaaaatcgtgaaagaagttacggaaaaactgtctaactacgaaattccgccggaaaaactggccatctacgaacaaattacccgcccgctgcatgaatataaagcaatcggtccgcacgtcgcagtggcaaaacgtctggcagcacgcggcgttaaagtcaaaccgggtatggtcatcggctatattgtgctgcgtggtgatggcccgatcagcaaccgcgcaattctggctgaagaatacgatctgaaaaaacacaaatacgacgccgaatattacatcgaaaatcaggttctgccggctgtcctgcgtattctggaagcgtttggctatcgtaaagaagatctgcgctggcagaaaacccgtcaaacgggtctgacctcatggctgaatattaaaaaatcgtaa

SEQ ID NO: 392 - DNA, 2328 bp, Artificial Sequence
  Synthetic
atgatcctggatgcggactacattaccgaagacggcaaaccggtcgtgcgtatcttcaaaaaagaaaacggcgaattcaaaatcgaatatgatcgcaactttgaaccgtatatctacgctctgctgaaagatgactccgcgatcgaagaagtgaagaaaattaccgccgaacgccatggcaaagtggttcgtgtcaaacgcgcagaaaaagtgaagaaaaaatttctgggtcgtccgattgaagtttggaaactgtatttcgaacatccgcaggatgtcccggctatccgtgacaaaattcgcgaacacccggcggtcgtggatatctatgaatacgacattccgtttgctaaacgttatctgatcgataaaggcctgattccgatggaaggtgacgaagaactgaaaatgctggcctttgatattgaaaccctgtatcacgaaggcgaagaattcggcaaaggtccgatcctgatgatttcatacgcagacgaagaagaagcgcgtgtgatcacctggaagaaaattgatctgccgtatgttgaagttgtctcgacggaacgtgaaatgatcaaacgttttctgcgcgtcattaaagaaaaagatccggacgtgctgatcacctataacggcgataattttgacttcgcatacctgaaaaaacgctgcgaaaaactgggtatcaaattcacgctgggccgtgatggtagcgaaccgaaaattcaacgtatgggcgatcgctttgcggtggacgttaaaggtcgcattcatttcgatctgtatccggttatccgtcgcaccattaatctgccgacctatacgctggaagcggtttacgaagccatctttggcaaaccgaaagaaaaagtgtacgccgaagaaattgcagaagcttgggaaaccggcgaaggtctggaacgtgtggcccgctattcaatggaagatgcaaaagttacgtacgaactgggtcgtgaatttttcccgatggaagcgcagctgagccgcctgattggccaaccgctgtgggatgtttctcgtagctctaccggtaacctggtcgaatggttcctgctgcgtaaagcgtatgaacgcaacgaactggcgccgaataaaccggatgaacgcgaatatgaacgtcgcctgcgtgaaagttatgaaggcggttacgttaaagaaccggaacgcggcctgtgggaaggtattgtgtcactggattttcgtagtctgtacccgtccattatcattacccataacgtttcgccggatacgctgaataaagaaggctgcggtgaatatgacgaagccccggaagtgggtcaccgcttctgtaaagattttccgggcttcattccgtcactgctgggttcgctgctggaagaacgccagaagatcaagaaacgtatgaaggaatctaaggatccggtggaacgcaaactgctggactatcgtcaacgcgcgatcaagattctggccaacagcttttatggctattacggttacgcgaaagcccgttggtactgcaaggaatgtgcagaaagcgtgaccgcttggggccgccagtatattgaactggtccgtcgcgaactggaagaacgtggttttaaagtgctgtatatcgataccgacggcctgtacgccacgattccgggtgaaaagaactgggaagaaatcaagcgtcgcgcactggaatttgttaactacatcaattccaaactgccgggcattctggaactggaatatgaaggcttctacacccgtggctttttcgtgacgaagaaaaagtatgcgctgatcgatgaagaaggcaaaattgtcacccgtggtctggaaatcgtgcgtcgcgattggagtgaaattgccaaagaaacccaggcaaaagttctggaagcaatcctgaaacatggtaatgtcgaagaagcagtgaaaattgtcaaggaagtgacggaaaaactgtcgaagtatgaaatcccgccggaaaaactggtgatctacgaacaaattacccgcccgctgcatgaatataaagcgattggcccgcacgtggcagttgctaaacgtctggcagcccgcggtgtcaaagtgcgtccgggcatggtgatcggttatattgttctgcgtggcgatggtccgatcagtaaacgcgcgattctggccgaagaatttgatccgcgcaaacacaagtacgacgccgaatattacatcgaaaaccaggtgctgccggctgttctgcgtattctggaagcgttcggctatcgtaaagaagatctgcgctggcagaaaaccaagcaaacgggtctgaccgcatggctgaatgtgaaaaagaaataa

SEQ ID NO: 393 - DNA, 2328 bp, Artificial Sequence
  Synthetic
atgatcctggatgcggactacattaccgaagacggcaaaccggtcgtgcgtatcttcaaaaaagaaaacggcgaattcaaaatcgaatatgatcgcaactttgaaccgtatatctacgctctgctgaaagatgactccgcgatcgaagaagtgaagaaaattaccgccgaacgccatggcaaagtggttcgtgtcaaacgcgcagaaaaagtgaagaaaaaatttctgggtcgtccgattgaagtttggaaactgtatttcgaacatccgcaggatgtcccggctatccgtgacaaaattcgcgaacacccggcggtcgtggatatctatgaatacgacattccgtttgctaaacgttatctgatcgataaaggcctgattccgatggaaggtgacgaagaactgaaaatgctggcctttgatattgaaaccctgtatcacgaaggcgaagaattcggcaaaggtccgatcctgatgatttcatacgcagacgaagaagaagcgcgtgtgatcacctggaagaaaattgatctgccgtatgttgaagttgtctcgacggaacgtgaaatgatcaaacgttttctgcgcgtcattaaagaaaaagatccggacgtgctgatcacctataacggcgataattttgacttcgcatacctgaaaaaacgctgcgaaaaactgggtatcaaattcacgctgggccgtgatggtagcgaaccgaaaattcaacgtatgggcgatcgctttgcggtggacgttaaaggtcgcattcatttcgatctgtatccggttatccgtcgcaccattaatctgccgacctatacgctggaagcggtttacgaagccatctttggcaaaccgaaagaaaaagtgtacgccgaagaaattgcagaagcttgggaaaccggcgaaggtctggaacgtgtggcccgctattcaatggaagatgcaaaagttacgtacgaactgggtcgtgaatttttcccgatggaagcgcagctgagccgcctgattggccaaccgctgtgggatgtttctcgtagctctaccggtaacctggtcgaatggttcctgctgcgtaaagcgtatgaacgcaacgaactggcgccgaataaaccgtcgggccgcgaatacgatgaacgtcgcgaaggttatgcgggcggttacgttaaagaaccggaacgtggtctgtgggaaaacatcgtgtacctggattacaaaagtctgtatccgtccattatcattacccataacgtgagcccggacacgctgaatcgcgaaggctgcaaagaatacgatgtcgccccgcaagtgggtcacaaattttgtaaagactttccgggcttcattccgtctctgctgggtgatctgctggaagaacgtcagaaaattaaaaagaaaatgaaagcaaccaaagatccgattgagaaaaaactgctggactatcgtcaacgcgcgatcaaaattctggccaacagttattacggctattacggttatgcgaaagcccgctggtactgcaaagaatgtgcagaatccgttacggcttggggccgtgaatatatcgaaaccacgatccgcgaaatcgaagaaaaatacggtttcaaagtgctgtacgccgataccgacggcttccatgcaacgatcccgggtgaagatgctgaagaaattaagaaaaaagcgaaagaattcctgaaatacatcaacagcaaactgccgggcgccctggaactggaatatgaaggcttctaccgtcgcggctttttcgtgaccaagaaaaaatacgcagttatcgacgaagaaggcaaaattaccacgcgtggtctggaaatcgtgcgtcgcgattggagtgaaattgccaaagaaacccaggcacgcgttctggaagcaatcctgcgtcatggtgacgtcgaagaagccgttcgcattgtcaaagatgtgacggaaaagctgtcgaaatatgaagtcccgccggaaaaactggtgatccatgaacaaattacccgtgaactgaaggattacaaagcgacgggcccgcacgttgcaattgctaaacgcctggcagcccgtggcatcaagattcgtccgggtaccgttatcagctatattgtcctgaaaggctctggtcgcatcggtgatcgtgctattccgtttgatgaattcgacccgacgaaacaccgttacgatgccgaatattacatcgaaaatcaggtgctgccggccgttgaacgcattctgaaagcatttggctataagaaagaagaactgcgctaccagaaaacccgtcaagtgggcctgggtgcgtggctgaagctgaaaggtaagaaataa

SEQ ID NO: 394 - DNA, 2322 bp, Artificial Sequence
  Synthetic
atgatcctggatgcggactacattaccgaagacggcaaaccggtcgtgcgtatcttcaaaaaagaaaacggcgaattcaaaatcgaatatgatcgcaactttgaaccgtatatctacgctctgctgaaagatgactccgcgatcgaagaagtgaagaaaattaccgccgaacgccatggcaaagtggttcgtgtcaaacgcgcagaaaaagtgaagaaaaaatttctgggtcgtccgattgaagtttggaaactgtatttcgaacatccgcaggatgtcccggctatccgtgacaaaattcgcgaacacccggcggtcgtggatatctatgaatacgacattccgtttgctaaacgttatctgatcgataaaggcctgattccgatggaaggtgacgaagaactgaaaatgctggcctttgatattgaaaccctgtatcacgaaggcgaagaattcggcaaaggtccgatcctgatgatttcatacgcagacgaagaagaagcgcgtgtgatcacctggaagaaaattgatctgccgtatgttgaagttgtctcgacggaacgtgaaatgatcaaacgttttctgcgcgtcattaaagaaaaagatccggacgtgctgatcacctataacggcgataattttgacttcgcatacctgaaaaaacgctgcgaaaaactgggtatcaaattcacgctgggccgtgatggtagcgaaccgaaaattcaacgtatgggcgatcgctttgcggtggacgttaaaggtcgcattcatttcgatctgtatccggttatccgtcgcaccattaatctgccgacctatacgctggaagcggtttacgaagccatctttggcaaaccgaaagaaaaagtgtacgccgaagaaattgcagaagcttgggaaaccggcgaaggtctggaacgtgtggcccgctattcaatggaagatgcaaaagttacgtacgaactgggtcgtgaatttttcccgatggaagcgcagctgagccgcctgattggccaaccgctgtgggatgtttctcgtagctctaccggtaacctggtcgaatggttcctgctgcgtaaagcgtatgaacgcaacgaactggcgccgaataaaccgtcgggccgcgaatacgatgaacgtcgcgaaggttatgcgggcggttacgttaaagaaccggaacgtggtctgtgggaaaacatcgtgtacctggattacaaaagtctgtatccgtccattatcattacccataacgtgagcccggacacgctgaatcgcgaaggctgcaaagaatacgatgtcgccccgcaagtgggtcacaaattttgtaaagactttccgggcttcattccgtctctgctgggtgatctgctggaagaacgtcagaaaattaaaaagaaaatgaaagcaaccaaagatccgattgagaaaaaactgctggactatcgtcaacgcgcgatcaaaattctggccaacagttattacggctattacggttatgcgaaagcccgctggtactgcaaagaatgtgcagaatccgttacggcttggggccgtgaatatatcgaaaccacgatccgcgaaatcgaagaaaaatacggtttcaaagtgctgtacgccgataccgacggcttccatgcaacgatcccgggtgaagatgctgaagaaattaagaaaaaagcgaaagaattcctgaaatacatcaacagcaaactgccgggcgccctggaactggaatatgaaggcttctaccgtcgcggctttttcgtgaccaagaaaaaatacgcagttatcgacgaagaaggcaaaattaccacgcgtggtctggaaatcgtgcgtcgcgattggagtgaaattgccaaagaaacccaggcacgtgtcctggaagcaatcctgaaacatggtgatgtggaagaagcggttcgcattgtcaaagaagtgacggaaaagctgtcgaaatatgaagttccgccggaaaaactggtcatccatgaacaaattacccgcgatctgcgtgactacaaagccacgggtccgcacgtggcagttgcaaaacgtctggcagcccgtggcgtgaagattcgtccgggtaccgtgatcagttatattgttctgaaaggctccggtcgcatcggtgaccgtgctattccgtttgatgaattcgacccgacgaaacaccgttacgatgccgaatattacatcgaaaatcaggtcctgccggccgtggaacgcattctgaaagcatttggttatcgcaaggaagatctgcgttaccagaagaccaaacaagtcggcctgggtgcgtggctgaaagtgaaaaagtaa

SEQ ID NO: 395 - DNA, 2328 bp, Artificial Sequence
  Synthetic
atgatcctggatgcggactacattaccgaagacggcaaaccggtcgtgcgtatcttcaaaaaagaaaacggcgaattcaaaatcgaatatgatcgcaactttgaaccgtatatctacgctctgctgaaagatgactccgcgatcgaagaagtgaagaaaattaccgccgaacgccatggcaaagtggttcgtgtcaaacgcgcagaaaaagtgaagaaaaaatttctgggtcgtccgattgaagtttggaaactgtatttcgaacatccgcaggatgtcccggctatccgtgacaaaattcgcgaacacccggcggtcgtggatatctatgaatacgacattccgtttgctaaacgttatctgatcgataaaggcctgattccgatggaaggtgacgaagaactgaaaatgctggcctttgatattgaaaccctgtatcacgaaggcgaagaattcggcaaaggtccgatcctgatgatttcatacgcagacgaagaagaagcgcgtgtgatcacctggaagaaaattgatctgccgtatgttgaagttgtctcgacggaacgtgaaatgatcaaacgttttctgcgcgtcattaaagaaaaagatccggacgtgctgatcacctataacggcgataattttgacttcgcatacctgaaaaaacgctgcgaaaaactgggtatcaaattcacgctgggccgtgatggtagcgaaccgaaaattcaacgtatgggcgatcgctttgcggtggacgttaaaggtcgcattcatttcgatctgtatccggttatccgtcgcaccattaatctgccgacctatacgctggaagcggtttacgaagccatctttggcaaaccgaaagaaaaagtgtacgccgaagaaattgcagaagcttgggaaaccggcgaaggtctggaacgtgtggcccgctattcaatggaagatgcaaaagttacgtacgaactgggtcgtgaatttttcccgatggaagcgcagctgagccgcctgattggccaaccgctgtgggatgtttctcgtagctctaccggtaacctggtcgaatggttcctgctgcgtaaagcgtatgaacgcaacgaactggcgccgaataaaccgtcgggccgcgaatacgatgaacgtcgcgaaggttatgcgggcggttacgttaaagaaccggaacgtggtctgtgggaaaacatcgtgtacctggattacaaaagtctgtatccgtccattatcattacccataacgtgagcccggacacgctgaatcgcgaaggctgcaaagaatacgatgtcgccccgcaagtgggtcacaaattttgtaaagactttccgggcttcattccgtctctgctgggtgatctgctggaagaacgtcagaaaattaaaaagaaaatgaaagcaaccaaagatccgattgagaaaaaactgctggactatcgtcaacgcgcgatcaaaattctggccaacagttattacggctattacggttatgcgaaagcccgctggtactgcaaagaatgtgcagaatccgttacggcttggggccgtgaatatatcgaaaccacgatccgcgaaatcgaagaaaaatacggtttcaaagtgctgtacgccgataccgacggcttccatgcaacgatcccgggtgaagatgctgaagaaattaagaaaaaagcgaaagaattcctgaaatacatcaacagcaaactgccgggcgccctggaactggaatatgaaggcttctaccgtcgcggctttttcgtgaccaagaaaaaatacgcagttatcgacgaagaaggcaaaattaccacgcgtggtctggaaatcgtgcgtcgcgattggagtgaaattgccaaagaaacccaggcacgtgtgctggaagctctgctgaaagatggcaatgttgaagaagcggtttccattgtcaaagaagtgacggaaaagctgggtaaatatgaagtcccgccggaaaaactggtgatccatgaacaaattacccgcgaactgaaggattacaaagcgacgggcccgcacgttgctatcgcgaaacgtctggcagcgcgtggcgtgaagattcgtccgggtaccgttatcagctatattgtcctgaaaggctctggtcgtatcggtgaccgcgcgattccgtttgatgaattcgacccgacgaaacatcgctacgatgcagaatattacatcgaaaaccaggttctgccggctgtcgaacgtattctgaaagcgtttggctatcgtgccgaagatctgcgctaccagaaaacccgtcaagtgggcctgggtgtttggctgcaaccgaaaggtaagaaataa

SEQ ID NO: 396 - DNA, 2325 bp, Artificial Sequence
  Synthetic
atgatcctggatgcggactacattaccgaagacggcaaaccggtcgtgcgtatcttcaaaaaagaaaacggcgaattcaaaatcgaatatgatcgcaactttgaaccgtatatctacgctctgctgaaagatgactccgcgatcgaagaagtgaagaaaattaccgccgaacgccatggcaaagtggttcgtgtcaaacgcgcagaaaaagtgaagaaaaaatttctgggtcgtccgattgaagtttggaaactgtatttcgaacatccgcaggatgtcccggctatccgtgacaaaattcgcgaacacccggcggtcgtggatatctatgaatacgacattccgtttgctaaacgttatctgatcgataaaggcctgattccgatggaaggtgacgaagaactgaaaatgctggcctttgatattgaaaccctgtatcacgaaggcgaagaattcggcaaaggtccgatcctgatgatttcatacgcagacgaagaagaagcgcgtgtgatcacctggaagaaaattgatctgccgtatgttgaagttgtctcgacggaacgtgaaatgatcaaacgttttctgcgcgtcattaaagaaaaagatccggacgtgctgatcacctataacggcgataattttgacttcgcatacctgaaaaaacgctgcgaaaaactgggtatcaaattcacgctgggccgtgatggtagcgaaccgaaaattcaacgtatgggcgatcgctttgcggtggacgttaaaggtcgcattcatttcgatctgtatccggttatccgtcgcaccattaatctgccgacctatacgctggaagcggtttacgaagccatctttggcaaaccgaaagaaaaagtgtacgccgaagaaattgcagaagcttgggaaaccggcgaaggtctggaacgtgtggcccgctattcaatggaagatgcaaaagttacgtacgaactgggtcgtgaatttttcccgatggaagcgcagctgagccgcctgattggccaaccgctgtgggatgtttctcgtagctctaccggtaacctggtcgaatggttcctgctgcgtaaagcgtatgaacgcaacgaactggcgccgaataaaccgtcgggccgcgaatacgatgaacgtcgcgaaggttatgcgggcggttacgttaaagaaccggaacgtggtctgtgggaaaacatcgtgtacctggattacaaaagtctgtatccgtccattatcattacccataacgtgagcccggacacgctgaatcgcgaaggctgcaaagaatacgatgtcgccccgcaagtgggtcacaaattttgtaaagactttccgggcttcattccgtctctgctgggtgatctgctggaagaacgtcagaaaattaaaaagaaaatgaaagcaaccaaagatccgattgagaaaaaactgctggactatcgtcaacgcgcgatcaaaattctggccaacagttattacggctattacggttatgcgaaagcccgctggtactgcaaagaatgtgcagaatccgttacggcttggggccgtgaatatatcgaaaccacgatccgcgaaatcgaagaaaaatacggtttcaaagtgctgtacgccgataccgacggcttccatgcaacgatcccgggtgaagatgctgaagaaattaagaaaaaagcgaaagaattcctgaaatacatcaacagcaaactgccgggcgccctggaactggaatatgaaggcttctaccgtcgcggctttttcgtgaccaagaaaaaatacgcagttatcgacgaagaaggcaaaattaccacgcgtggtctggaaatcgtgcgtcgcgattggagtgaaattgccaaagaaacccaggcaaaggttctggaagcaattctgaaacatggtaacgtcgaagaagcggtcaagatcgtgaaagaagttaccgaaaaactgtcgaattatgaaattccggtcgaaaagctggtgatctacgaacaaattacgcgcccgctgaacgaatataaagccattggcccgcacgtggcagttgctaaacgtctggcggccaagggtatcaagattaaaccgggcatggtgattggttatgttgtcctgcgcggcgatggtccgatcagcaaacgtgcgatcgccatcgaagaattcgatggcaaaaagcataagtacgacgcagaatactacatcgaaaatcaggttctgccggccgtcgaacgtatcctgaaagcattcggttataagcgtgaagatctgcgctggcagaagaccaaacaagtgggcctgggtgcgtggctgaaagttaaaaagtcttaa

SEQ ID NO: 397 - DNA, 2328 bp, Artificial Sequence
  Synthetic
atgatcctggatgcggactacattaccgaagacggcaaaccggtcgtgcgtatcttcaaaaaagaaaacggcgaattcaaaatcgaatatgatcgcaactttgaaccgtatatctacgctctgctgaaagatgactccgcgatcgaagaagtgaagaaaattaccgccgaacgccatggcaaagtggttcgtgtcaaacgcgcagaaaaagtgaagaaaaaatttctgggtcgtccgattgaagtttggaaactgtatttcgaacatccgcaggatgtcccggctatccgtgacaaaattcgcgaacacccggcggtcgtggatatctatgaatacgacattccgtttgctaaacgttatctgatcgataaaggcctgattccgatggaaggtgacgaagaactgaaaatgctggcctttgatattgaaaccctgtatcacgaaggcgaagaattcggcaaaggtccgatcctgatgatttcatacgcagacgaagaagaagcgcgtgtgatcacctggaagaaaattgatctgccgtatgttgaagttgtctcgacggaacgtgaaatgatcaaacgttttctgcgcgtcattaaagaaaaagatccggacgtgctgatcacctataacggcgataattttgacttcgcatacctgaaaaaacgctgcgaaaaactgggtatcaaattcacgctgggccgtgatggtagcgaaccgaaaattcaacgtatgggcgatcgctttgcggtggacgttaaaggtcgcattcatttcgatctgtatccggttatccgtcgcaccattaatctgccgacctatacgctggaagcggtttacgaagccatctttggcaaaccgaaagaaaaagtgtacgccgaagaaattgcagaagcttgggaaaccggcgaaggtctggaacgtgtggcccgctattcaatggaagatgcaaaagttacgtacgaactgggtcgtgaatttttcccgatggaagcgcagctgagccgcctgattggccaaccgctgtgggatgtttctcgtagctctaccggtaacctggtcgaatggttcctgctgcgtaaagcgtatgaacgcaacgaactggcgccgaataaaccgtcgggccgcgaatacgatgaacgtcgcgaaggttatgcgggcggttacgttaaagaaccggaacgtggtctgtgggaaaacatcgtgtacctggattacaaaagtctgtatccgtccattatcattacccataacgtgagcccggacacgctgaatcgcgaaggctgcaaagaatacgatgtcgccccgcaagtgggtcacaaattttgtaaagactttccgggcttcattccgtctctgctgggtgatctgctggaagaacgtcagaaaattaaaaagaaaatgaaagcaaccaaagatccgattgagaaaaaactgctggactatcgtcaacgcgcgatcaaaattctggccaacagttattacggctattacggttatgcgaaagcccgctggtactgcaaagaatgtgcagaatccgttacggcttggggccgtgaatatatcgaaaccacgatccgcgaaatcgaagaaaaatacggtttcaaagtgctgtacgccgataccgacggcttccatgcaacgatcccgggtgaagatgctgaagaaattaagaaaaaagcgaaagaattcctgaaatacatcaacagcaaactgccgggcgccctggaactggaatatgaaggcttctaccgtcgcggctttttcgtgaccaagaaaaaatacgcagttatcgacgaagaaggcaaaattaccacgcgtggtctggaaatcgtgcgtcgcgattggagtgaaattgccaaagaaacccaggcacgtgttctggaagcactgctgaaagatggtaatgtcgaagaagcagtgagtattgttaaagaagtcacggaaaaactgtccaagtatgaagtcccgccggaaaaactggtgattcatgaacaaatcacccgcgaactgaaagattacaaggcgacgggcccgcacgtggcaattgctaaacgtctggcagcgcgtggcgttaagatccgtccgggtaccgttattagctatatcgtcctgaaaggctctggtcgtattggtgaccgcgccatcccgtttgatgaattcgacccggctaaacaccgctacgatgcggaatattacattgaaaatcaggtcctgccggctgtggaacgtatcctgaaagcgtttggctatcgtaaggaagatctgcgctaccagaaaacccgtcaagtgggcctgggtgcgtggctgaaaccgaagggtaaaaagtaa

SEQ ID NO: 398 - DNA, 2328 bp, Artificial Sequence
  Synthetic
atgatcctggatgcggactacattaccgaagacggcaaaccggtcgtgcgtatcttcaaaaaagaaaacggcgaattcaaaatcgaatatgatcgcaactttgaaccgtatatctacgctctgctgaaagatgactccgcgatcgaagaagtgaagaaaattaccgccgaacgccatggcaaagtggttcgtgtcaaacgcgcagaaaaagtgaagaaaaaatttctgggtcgtccgattgaagtttggaaactgtatttcgaacatccgcaggatgtcccggctatccgtgacaaaattcgcgaacacccggcggtcgtggatatctatgaatacgacattccgtttgctaaacgttatctgatcgataaaggcctgattccgatggaaggtgacgaagaactgaaaatgctggcctttgatattgaaaccctgtatcacgaaggcgaagaattcggcaaaggtccgatcctgatgatttcatacgcagacgaagaagaagcgcgtgtgatcacctggaagaaaattgatctgccgtatgttgaagttgtctcgacggaacgtgaaatgatcaaacgttttctgcgcgtcattaaagaaaaagatccggacgtgctgatcacctataacggcgataattttgacttcgcatacctgaaaaaacgctgcgaaaaactgggtatcaaattcacgctgggccgtgatggtagcgaaccgaaaattcaacgtatgggcgatcgctttgcggtggacgttaaaggtcgcattcatttcgatctgtatccggttatccgtcgcaccattaatctgccgacctatacgctggaagcggtttacgaagccatctttggcaaaccgaaagaaaaagtgtacgccgaagaaattgcagaagcttgggaaaccggcgaaggtctggaacgtgtggcccgctattcaatggaagatgcaaaagttacgtacgaactgggtcgtgaatttttcccgatggaagcgcagctgagccgcctgattggccaaccgctgtgggatgtttctcgtagctctaccggtaacctggtcgaatggttcctgctgcgtaaagcgtatgaacgcaacgaactggcgccgaataaaccgtcgggccgcgaatacgatgaacgtcgcgaaggttatgcgggcggttacgttaaagaaccggaacgtggtctgtgggaaaacatcgtgtacctggattacaaaagtctgtatccgtccattatcattacccataacgtgagcccggacacgctgaatcgcgaaggctgcaaagaatacgatgtcgccccgcaagtgggtcacaaattttgtaaagactttccgggcttcattccgtctctgctgggtgatctgctggaagaacgtcagaaaattaaaaagaaaatgaaagcaaccaaagatccgattgagaaaaaactgctggactatcgtcaacgcgcgatcaaaattctggccaacagttattacggctattacggttatgcgaaagcccgctggtactgcaaagaatgtgcagaatccgttacggcttggggccgtgaatatatcgaaaccacgatccgcgaaatcgaagaaaaatacggtttcaaagtgctgtacgccgataccgacggcttccatgcaacgatcccgggtgaagatgctgaagaaattaagaaaaaagcgaaagaattcctgaaatacatcaacagcaaactgccgggcgccctggaactggaatatgaaggcttctaccgtcgcggctttttcgtgaccaagaaaaaatacgcagttatcgacgaagaaggcaaaattaccacgcgtggtctggaaatcgtgcgtcgcgattggagtgaaattgccaaagaaacccaggcacgcgtcctggaagcaatcctgaaagatggtgacgtggaagaagccgtccgtattgtgaaagaagttacggaaaaactgtccaaatatgaagttccgccggaaaaactggtcatccatgaacaaattacccgcgaactgaaagattacaaagcgacgggcccgcacgtcgcaatcgctaaacgtctggcggcgcgtggcgtgaaaattcgtccgggtaccgtgatctcatatattgttctgaaaggctcgggtcgtatcggtgaccgcgctattccgtttgatgaattcgacccgaaaaaacacaaatacgatgcggaatactacatcgaaaaccaggttctgccggccgtcgaacgtattctgcgcgcatttggctaccgtaaagaagatctgcgttatcaaaaaaccaaacaagtgggtctgggtgcgtggctgaaaccgaaaggtaaaaaataa

SEQ ID NO: 399 - DNA, 2325 bp, Artificial Sequence
  Synthetic
atgatcctggatgcggactacattaccgaagacggcaaaccggtcgtgcgtatcttcaaaaaagaaaacggcgaattcaaaatcgaatatgatcgcaactttgaaccgtatatctacgctctgctgaaagatgactccgcgatcgaagaagtgaagaaaattaccgccgaacgccatggcaaagtggttcgtgtcaaacgcgcagaaaaagtgaagaaaaaatttctgggtcgtccgattgaagtttggaaactgtatttcgaacatccgcaggatgtcccggctatccgtgacaaaattcgcgaacacccggcggtcgtggatatctatgaatacgacattccgtttgctaaacgttatctgatcgataaaggcctgattccgatggaaggtgacgaagaactgaaaatgctggcctttgatattgaaaccctgtatcacgaaggcgaagaattcggcaaaggtccgatcctgatgatttcatacgcagacgaagaagaagcgcgtgtgatcacctggaagaaaattgatctgccgtatgttgaagttgtctcgacggaacgtgaaatgatcaaacgttttctgcgcgtcattaaagaaaaagatccggacgtgctgatcacctataacggcgataattttgacttcgcatacctgaaaaaacgctgcgaaaaactgggtatcaaattcacgctgggccgtgatggtagcgaaccgaaaattcaacgtatgggcgatcgctttgcggtggacgttaaaggtcgcattcatttcgatctgtatccggttatccgtcgcaccattaatctgccgacctatacgctggaagcggtttacgaagccatctttggcaaaccgaaagaaaaagtgtacgccgaagaaattgcagaagcttgggaaaccggcgaaggtctggaacgtgtggcccgctattcaatggaagatgcaaaagttacgtacgaactgggtcgtgaatttttcccgatggaagcgcagctgagccgcctgattggccaaccgctgtgggatgtttctcgtagctctaccggtaacctggtcgaatggttcctgctgcgtaaagcgtatgaacgcaacgaactggcgccgaataaaccgtcgggccgcgaatacgatgaacgtcgcgaaggttatgcgggcggttacgttaaagaaccggaacgtggtctgtgggaaaacatcgtgtacctggattacaaaagtctgtatccgtccattatcattacccataacgtgagcccggacacgctgaatcgcgaaggctgcaaagaatacgatgtcgccccgcaagtgggtcacaaattttgtaaagactttccgggcttcattccgtctctgctgggtgatctgctggaagaacgtcagaaaattaaaaagaaaatgaaagcaaccaaagatccgattgagaaaaaactgctggactatcgtcaacgcgcgatcaaaattctggccaacagttattacggctattacggttatgcgaaagcccgctggtactgcaaagaatgtgcagaatccgttacggcttggggccgtgaatatatcgaaaccacgatccgcgaaatcgaagaaaaatacggtttcaaagtgctgtacgccgataccgacggcttccatgcaacgatcccgggtgaagatgctgaagaaattaagaaaaaagcgaaagaattcctgaaatacatcaacagcaaactgccgggcgccctggaactggaatatgaaggcttctaccgtcgcggctttttcgtgaccaagaaaaaatacgcagttatcgacgaagaaggcaaaattaccacgcgtggtctggaaatcgtgcgtcgcgattggagtgaaattgccaaagaaacccaggcacgtgttctggaagcaattctgaaacatggtaacgtcgaagaagcggtcaaaatcgtgaaagaagttacggaaaaactgtctaactacgaaattccgccggaaaaactggccatctacgaacaaattacccgcccgctgcatgaatataaagcaatcggtccgcacgtcgcagtggcaaaacgtctggcagcacgcggcgttaaagtcaaaccgggtatggtcatcggctatattgtgctgcgtggtgatggcccgatcagcaaccgcgcaattctggctgaagaatacgatctgaaaaaacacaaatacgacgccgaatattacatcgaaaatcaggttctgccggctgtcctgcgtattctggaagcgtttggctatcgtaaagaagatctgcgctggcagaaaacccgtcaaacgggtctgacctcatggctgaatattaaaaaatcgtaa

SEQ ID NO: 400 - DNA, 2325 bp, Artificial Sequence
  Synthetic
atgatcctggatgcggactacattaccgaagacggcaaaccggtcgtgcgtatcttcaaaaaagaaaacggcgaattcaaaatcgaatatgatcgcaactttgaaccgtatatctacgctctgctgaaagatgactccgcgatcgaagaagtgaagaaaattaccgccgaacgccatggcaaagtggttcgtgtcaaacgcgcagaaaaagtgaagaaaaaatttctgggtcgtccgattgaagtttggaaactgtatttcgaacatccgcaggatgtcccggctatccgtgacaaaattcgcgaacacccggcggtcgtggatatctatgaatacgacattccgtttgctaaacgttatctgatcgataaaggcctgattccgatggaaggtgacgaagaactgaaaatgctggcctttgatattgaaaccctgtatcacgaaggcgaagaattcggcaaaggtccgatcctgatgatttcatacgcagacgaagaagaagcgcgtgtgatcacctggaagaaaattgatctgccgtatgttgaagttgtctcgacggaacgtgaaatgatcaaacgttttctgcgcgtcattaaagaaaaagatccggacgtgctgatcacctataacggcgataattttgacttcgcatacctgaaaaaacgctgcgaaaaactgggtatcaaattcacgctgggccgtgatggtagcgaaccgaaaattcaacgtatgggcgatcgctttgcggtggacgttaaaggtcgcattcatttcgatctgtatccggttatccgtcgcaccattaatctgccgacctatacgctggaagcggtttacgaagccatctttggcaaaccgaaagaaaaagtgtacgccgaagaaattgcagaagcttgggaaaccggcgaaggtctggaacgtgtggcccgctattcaatggaagatgcaaaagttacgtacgaactgggtcgtgaatttttcccgatggaagcgcagctgagccgcctgattggccaaccgctgtgggatgtttctcgtagctctaccggtaacctggtcgaatggttcctgctgcgtaaagcgtatgaacgcaacgaactggcgccgaataaaccgtcgggccgcgaatacgatgaacgtcgcgaaggttatgcgggcggttacgttaaagaaccggaacgtggtctgtgggaaaacatcgtgtacctggattacaaaagtctgtatccgtccattatcattacccataacgtgagcccggacacgctgaatcgcgaaggctgcaaagaatacgatgtcgccccgcaagtgggtcacaaattttgtaaagactttccgggcttcattccgtctctgctgggtgatctgctggaagaacgtcagaaaattaaaaagaaaatgaaagcaaccaaagatccgattgagaaaaaactgctggactatcgtcaacgcgcgatcaaaattctggccaacagttattacggctattacggttatgcgaaagcccgctggtactgcaaagaatgtgcagaatccgttacggcttggggccgtgaatatatcgaaaccacgatccgcgaaatcgaagaaaaatacggtttcaaagtgctgtacgccgataccgacggcttccatgcaacgatcccgggtgaagatgctgaagaaattaagaaaaaagcgaaagaattcctgaaatacatcaacagcaaactgccgggcgccctggaactggaatatgaaggcttctaccgtcgcggctttttcgtgaccaagaaaaaatacgcagttatcgacgaagaaggcaaaattaccacgcgtggtctggaaatcgtgcgtcgcgattggagtgaaattgccaaagaaacccaggcaaaagttctggaagcaatcctgaaacatggtaatgtcgaagaagcagtgaaaattgtcaaggaagtgacggaaaaactgtcgaagtatgaaatcccgccggaaaaactggtgatctacgaacaaattacccgcccgctgcatgaatataaagcgattggcccgcacgtggcagttgctaaacgtctggcagcccgcggtgtcaaagtgcgtccgggcatggtgatcggttatattgttctgcgtggcgatggtccgatcagtaaacgcgcgattctggccgaagaatttgatccgcgcaaacacaagtacgacgccgaatattacatcgaaaaccaggtgctgccggctgttctgcgtattctggaagcgttcggctatcgtaaagaagatctgcgctggcagaaaaccaagcaaacgggtctgaccgcatggctgaatgtgaaaaagaaataa

SEQ ID NO: 401 - DNA, 2331 bp, Artificial Sequence
  Synthetic
atgatcctggatgcggactacattaccgaagacggcaaaccggtcgtgcgtatcttcaaaaaagaaaacggcgaattcaaaatcgaatatgatcgcaactttgaaccgtatatctacgctctgctgaaagatgactccgcgatcgaagaagtgaagaaaattaccgccgaacgccatggcaaagtggttcgtgtcaaacgcgcagaaaaagtgaagaaaaaatttctgggtcgtccgattgaagtttggaaactgtatttcgaacatccgcaggatgtcccggctatccgtgacaaaattcgcgaacacccggcggtcgtggatatctatgaatacgacattccgtttgctaaacgttatctgatcgataaaggcctgattccgatggaaggtgacgaagaactgaaaatgctggcctttgatattgaaaccctgtatcacgaaggcgaagaattcggcaaaggtccgatcctgatgatttcatacgcagacgaagaagaagcgcgtgtgatcacctggaagaaaattgatctgccgtatgttgaagttgtctcgacggaacgtgaaatgatcaaacgttttctgcgcgtcattaaagaaaaagatccggacgtgctgatcacctataacggcgataattttgacttcgcatacctgaaaaaacgctgcgaaaaactgggtatcaaattcacgctgggccgtgatggtagcgaaccgaaaattcaacgtatgggcgatcgctttgcggtggacgttaaaggtcgcattcatttcgatctgtatccggttatccgtcgcaccattaatctgccgacctatacgctggaagcggtttacgaagccatctttggcaaaccgaaagaaaaagtgtacgccgaagaaattgcagaagcttgggaaaccggcgaaggtctggaacgtgtggcccgctattcaatggaagatgcaaaagttacgtacgaactgggtcgtgaatttttcccgatggaagcgcagctgagccgcctgattggccaaccgctgtgggatgtttctcgtagctctaccggtaacctggtcgaatggttcctgctgcgtaaagcgtatgaacgcaacgaactggcaccgaataaaccggatgaacgtgaatatgaacgtcgcctgcgcgaatcttatgccggcggttacgttaaggaaccggaaaaaggcctgtgggaaggtctggtgtctctggattttcgctcactgtacccgtcgattatcattacgcataacgtgtccccggacaccctgaatcgtgaaggctgcatggaatatgatgttgctccggaagtcaaacacaagttttgtaaagactttccgggtttcattccgtcactgctgaaacgtctgctggatgaacgccaggaaatcaaacgtcgcatgaaagcctcgaaggatccgattgaaaagaaaatgctggactatcgtcaacgcgcaatcaaaattctggctaatagctattacggctattacggttatgcgaaggcccgctggtactgcaaagaatgtgcggaatctgtcacggcctggggccgtgaatatatcgaatttgtgcgcaaagaactggaagaaaagttcggtttcaaggttctgtacattgatacggacggcctgtacgcaaccatcccgggtgctaaaccggaagaaattaagcgtaaggccctggaatttgtggaatacatcaacgcaaaactgccgggcctgctggaactggaatatgaaggcttctacgttcgcggctttttcgtcacgaagaaaaagtatgcgctgattgacgaagaaggcaaaatcattacccgtggtctggaaatcgttcgtcgcgattggagtgaaattgccaaagaaacccaggcacgcgttctggaagcaatcctgcgtcatggtgacgtcgaagaagccgttcgcattgtcaaagatgtgacggaaaagctgtcgaaatatgaagtcccgccggaaaaactggtgatccatgaacaaattacccgtgaactgaaggattacaaagcgacgggcccgcacgttgcaattgctaaacgcctggcagcccgtggcatcaagattcgtccgggtaccgttatcagctatattgtcctgaaaggctctggtcgcatcggtgatcgtgctattccgtttgatgaattcgacccgacgaaacaccgttacgatgccgaatattacatcgaaaatcaggtgctgccggccgttgaacgcattctgaaagcatttggctataagaaagaagaactgcgctaccagaaaacccgtcaagtgggcctgggtgcgtggctgaagctgaaaggtaagaaataa

SEQ ID NO: 402 - DNA, 2325 bp, Artificial Sequence
  Synthetic
atgatcctggatgcggactacattaccgaagacggcaaaccggtcgtgcgtatcttcaaaaaagaaaacggcgaattcaaaatcgaatatgatcgcaactttgaaccgtatatctacgctctgctgaaagatgactccgcgatcgaagaagtgaagaaaattaccgccgaacgccatggcaaagtggttcgtgtcaaacgcgcagaaaaagtgaagaaaaaatttctgggtcgtccgattgaagtttggaaactgtatttcgaacatccgcaggatgtcccggctatccgtgacaaaattcgcgaacacccggcggtcgtggatatctatgaatacgacattccgtttgctaaacgttatctgatcgataaaggcctgattccgatggaaggtgacgaagaactgaaaatgctggcctttgatattgaaaccctgtatcacgaaggcgaagaattcggcaaaggtccgatcctgatgatttcatacgcagacgaagaagaagcgcgtgtgatcacctggaagaaaattgatctgccgtatgttgaagttgtctcgacggaacgtgaaatgatcaaacgttttctgcgcgtcattaaagaaaaagatccggacgtgctgatcacctataacggcgataattttgacttcgcatacctgaaaaaacgctgcgaaaaactgggtatcaaattcacgctgggccgtgatggtagcgaaccgaaaattcaacgtatgggcgatcgctttgcggtggacgttaaaggtcgcattcatttcgatctgtatccggttatccgtcgcaccattaatctgccgacctatacgctggaagcggtttacgaagccatctttggcaaaccgaaagaaaaagtgtacgccgaagaaattgcagaagcttgggaaaccggcgaaggtctggaacgtgtggcccgctattcaatggaagatgcaaaagttacgtacgaactgggtcgtgaatttttcccgatggaagcgcagctgagccgcctgattggccaaccgctgtgggatgtttctcgtagctctaccggtaacctggtcgaatggttcctgctgcgtaaagcgtatgaacgcaacgaactggcaccgaataaaccggatgaacgtgaatatgaacgtcgcctgcgcgaatcttatgccggcggttacgttaaggaaccggaaaaaggcctgtgggaaggtctggtgtctctggattttcgctcactgtacccgtcgattatcattacgcataacgtgtccccggacaccctgaatcgtgaaggctgcatggaatatgatgttgctccggaagtcaaacacaagttttgtaaagactttccgggtttcattccgtcactgctgaaacgtctgctggatgaacgccaggaaatcaaacgtcgcatgaaagcctcgaaggatccgattgaaaagaaaatgctggactatcgtcaacgcgcaatcaaaattctggctaatagctattacggctattacggttatgcgaaggcccgctggtactgcaaagaatgtgcggaatctgtcacggcctggggccgtgaatatatcgaatttgtgcgcaaagaactggaagaaaagttcggtttcaaggttctgtacattgatacggacggcctgtacgcaaccatcccgggtgctaaaccggaagaaattaagcgtaaggccctggaatttgtggaatacatcaacgcaaaactgccgggcctgctggaactggaatatgaaggcttctacgttcgcggctttttcgtcacgaagaaaaagtatgcgctgattgacgaagaaggcaaaatcattacccgtggtctggaaatcgttcgtcgcgattggagtgaaattgccaaagaaacccaggcacgtgtcctggaagcaatcctgaaacatggtgatgtggaagaagcggttcgcattgtcaaagaagtgacggaaaagctgtcgaaatatgaagttccgccggaaaaactggtcatccatgaacaaattacccgcgatctgcgtgactacaaagccacgggtccgcacgtggcagttgcaaaacgtctggcagcccgtggcgtgaagattcgtccgggtaccgtgatcagttatattgttctgaaaggctccggtcgcatcggtgaccgtgctattccgtttgatgaattcgacccgacgaaacaccgttacgatgccgaatattacatcgaaaatcaggtcctgccggccgtggaacgcattctgaaagcatttggttatcgcaaggaagatctgcgttaccagaagaccaaacaagtcggcctgggtgcgtggctgaaagtgaaaaagtaa

SEQ ID NO: 403 - DNA, 2331 bp, Artificial Sequence
  Synthetic
atgatcctggatgcggactacattaccgaagacggcaaaccggtcgtgcgtatcttcaaaaaagaaaacggcgaattcaaaatcgaatatgatcgcaactttgaaccgtatatctacgctctgctgaaagatgactccgcgatcgaagaagtgaagaaaattaccgccgaacgccatggcaaagtggttcgtgtcaaacgcgcagaaaaagtgaagaaaaaatttctgggtcgtccgattgaagtttggaaactgtatttcgaacatccgcaggatgtcccggctatccgtgacaaaattcgcgaacacccggcggtcgtggatatctatgaatacgacattccgtttgctaaacgttatctgatcgataaaggcctgattccgatggaaggtgacgaagaactgaaaatgctggcctttgatattgaaaccctgtatcacgaaggcgaagaattcggcaaaggtccgatcctgatgatttcatacgcagacgaagaagaagcgcgtgtgatcacctggaagaaaattgatctgccgtatgttgaagttgtctcgacggaacgtgaaatgatcaaacgttttctgcgcgtcattaaagaaaaagatccggacgtgctgatcacctataacggcgataattttgacttcgcatacctgaaaaaacgctgcgaaaaactgggtatcaaattcacgctgggccgtgatggtagcgaaccgaaaattcaacgtatgggcgatcgctttgcggtggacgttaaaggtcgcattcatttcgatctgtatccggttatccgtcgcaccattaatctgccgacctatacgctggaagcggtttacgaagccatctttggcaaaccgaaagaaaaagtgtacgccgaagaaattgcagaagcttgggaaaccggcgaaggtctggaacgtgtggcccgctattcaatggaagatgcaaaagttacgtacgaactgggtcgtgaatttttcccgatggaagcgcagctgagccgcctgattggccaaccgctgtgggatgtttctcgtagctctaccggtaacctggtcgaatggttcctgctgcgtaaagcgtatgaacgcaacgaactggcaccgaataaaccggatgaacgtgaatatgaacgtcgcctgcgcgaatcttatgccggcggttacgttaaggaaccggaaaaaggcctgtgggaaggtctggtgtctctggattttcgctcactgtacccgtcgattatcattacgcataacgtgtccccggacaccctgaatcgtgaaggctgcatggaatatgatgttgctccggaagtcaaacacaagttttgtaaagactttccgggtttcattccgtcactgctgaaacgtctgctggatgaacgccaggaaatcaaacgtcgcatgaaagcctcgaaggatccgattgaaaagaaaatgctggactatcgtcaacgcgcaatcaaaattctggctaatagctattacggctattacggttatgcgaaggcccgctggtactgcaaagaatgtgcggaatctgtcacggcctggggccgtgaatatatcgaatttgtgcgcaaagaactggaagaaaagttcggtttcaaggttctgtacattgatacggacggcctgtacgcaaccatcccgggtgctaaaccggaagaaattaagcgtaaggccctggaatttgtggaatacatcaacgcaaaactgccgggcctgctggaactggaatatgaaggcttctacgttcgcggctttttcgtcacgaagaaaaagtatgcgctgattgacgaagaaggcaaaatcattacccgtggtctggaaatcgttcgtcgcgattggagtgaaattgccaaagaaacccaggcacgtgtgctggaagctctgctgaaagatggcaatgttgaagaagcggtttccattgtcaaagaagtgacggaaaagctgggtaaatatgaagtcccgccggaaaaactggtgatccatgaacaaattacccgcgaactgaaggattacaaagcgacgggcccgcacgttgctatcgcgaaacgtctggcagcgcgtggcgtgaagattcgtccgggtaccgttatcagctatattgtcctgaaaggctctggtcgtatcggtgaccgcgcgattccgtttgatgaattcgacccgacgaaacatcgctacgatgcagaatattacatcgaaaaccaggttctgccggctgtcgaacgtattctgaaagcgtttggctatcgtgccgaagatctgcgctaccagaaaacccgtcaagtgggcctgggtgtttggctgcaaccgaaaggtaagaaataa

SEQ ID NO: 404 - DNA, 2328 bp, Artificial Sequence
  Synthetic
atgatcctggatgcggactacattaccgaagacggcaaaccggtcgtgcgtatcttcaaaaaagaaaacggcgaattcaaaatcgaatatgatcgcaactttgaaccgtatatctacgctctgctgaaagatgactccgcgatcgaagaagtgaagaaaattaccgccgaacgccatggcaaagtggttcgtgtcaaacgcgcagaaaaagtgaagaaaaaatttctgggtcgtccgattgaagtttggaaactgtatttcgaacatccgcaggatgtcccggctatccgtgacaaaattcgcgaacacccggcggtcgtggatatctatgaatacgacattccgtttgctaaacgttatctgatcgataaaggcctgattccgatggaaggtgacgaagaactgaaaatgctggcctttgatattgaaaccctgtatcacgaaggcgaagaattcggcaaaggtccgatcctgatgatttcatacgcagacgaagaagaagcgcgtgtgatcacctggaagaaaattgatctgccgtatgttgaagttgtctcgacggaacgtgaaatgatcaaacgttttctgcgcgtcattaaagaaaaagatccggacgtgctgatcacctataacggcgataattttgacttcgcatacctgaaaaaacgctgcgaaaaactgggtatcaaattcacgctgggccgtgatggtagcgaaccgaaaattcaacgtatgggcgatcgctttgcggtggacgttaaaggtcgcattcatttcgatctgtatccggttatccgtcgcaccattaatctgccgacctatacgctggaagcggtttacgaagccatctttggcaaaccgaaagaaaaagtgtacgccgaagaaattgcagaagcttgggaaaccggcgaaggtctggaacgtgtggcccgctattcaatggaagatgcaaaagttacgtacgaactgggtcgtgaatttttcccgatggaagcgcagctgagccgcctgattggccaaccgctgtgggatgtttctcgtagctctaccggtaacctggtcgaatggttcctgctgcgtaaagcgtatgaacgcaacgaactggcaccgaataaaccggatgaacgtgaatatgaacgtcgcctgcgcgaatcttatgccggcggttacgttaaggaaccggaaaaaggcctgtgggaaggtctggtgtctctggattttcgctcactgtacccgtcgattatcattacgcataacgtgtccccggacaccctgaatcgtgaaggctgcatggaatatgatgttgctccggaagtcaaacacaagttttgtaaagactttccgggtttcattccgtcactgctgaaacgtctgctggatgaacgccaggaaatcaaacgtcgcatgaaagcctcgaaggatccgattgaaaagaaaatgctggactatcgtcaacgcgcaatcaaaattctggctaatagctattacggctattacggttatgcgaaggcccgctggtactgcaaagaatgtgcggaatctgtcacggcctggggccgtgaatatatcgaatttgtgcgcaaagaactggaagaaaagttcggtttcaaggttctgtacattgatacggacggcctgtacgcaaccatcccgggtgctaaaccggaagaaattaagcgtaaggccctggaatttgtggaatacatcaacgcaaaactgccgggcctgctggaactggaatatgaaggcttctacgttcgcggctttttcgtcacgaagaaaaagtatgcgctgattgacgaagaaggcaaaatcattacccgtggtctggaaatcgttcgtcgcgattggagtgaaattgccaaagaaacccaggcaaaggttctggaagcaattctgaaacatggtaacgtcgaagaagcggtcaagatcgtgaaagaagttaccgaaaaactgtcgaattatgaaattccggtcgaaaagctggtgatctacgaacaaattacgcgcccgctgaacgaatataaagccattggcccgcacgtggcagttgctaaacgtctggcggccaagggtatcaagattaaaccgggcatggtgattggttatgttgtcctgcgcggcgatggtccgatcagcaaacgtgcgatcgccatcgaagaattcgatggcaaaaagcataagtacgacgcagaatactacatcgaaaatcaggttctgccggccgtcgaacgtatcctgaaagcattcggttataagcgtgaagatctgcgctggcagaagaccaaacaagtgggcctgggtgcgtggctgaaagttaaaaagtcttaa

SEQ ID NO: 405 - DNA, 2331 bp, Artificial Sequence
  Synthetic
atgatcctggatgcggactacattaccgaagacggcaaaccggtcgtgcgtatcttcaaaaaagaaaacggcgaattcaaaatcgaatatgatcgcaactttgaaccgtatatctacgctctgctgaaagatgactccgcgatcgaagaagtgaagaaaattaccgccgaacgccatggcaaagtggttcgtgtcaaacgcgcagaaaaagtgaagaaaaaatttctgggtcgtccgattgaagtttggaaactgtatttcgaacatccgcaggatgtcccggctatccgtgacaaaattcgcgaacacccggcggtcgtggatatctatgaatacgacattccgtttgctaaacgttatctgatcgataaaggcctgattccgatggaaggtgacgaagaactgaaaatgctggcctttgatattgaaaccctgtatcacgaaggcgaagaattcggcaaaggtccgatcctgatgatttcatacgcagacgaagaagaagcgcgtgtgatcacctggaagaaaattgatctgccgtatgttgaagttgtctcgacggaacgtgaaatgatcaaacgttttctgcgcgtcattaaagaaaaagatccggacgtgctgatcacctataacggcgataattttgacttcgcatacctgaaaaaacgctgcgaaaaactgggtatcaaattcacgctgggccgtgatggtagcgaaccgaaaattcaacgtatgggcgatcgctttgcggtggacgttaaaggtcgcattcatttcgatctgtatccggttatccgtcgcaccattaatctgccgacctatacgctggaagcggtttacgaagccatctttggcaaaccgaaagaaaaagtgtacgccgaagaaattgcagaagcttgggaaaccggcgaaggtctggaacgtgtggcccgctattcaatggaagatgcaaaagttacgtacgaactgggtcgtgaatttttcccgatggaagcgcagctgagccgcctgattggccaaccgctgtgggatgtttctcgtagctctaccggtaacctggtcgaatggttcctgctgcgtaaagcgtatgaacgcaacgaactggcaccgaataaaccggatgaacgtgaatatgaacgtcgcctgcgcgaatcttatgccggcggttacgttaaggaaccggaaaaaggcctgtgggaaggtctggtgtctctggattttcgctcactgtacccgtcgattatcattacgcataacgtgtccccggacaccctgaatcgtgaaggctgcatggaatatgatgttgctccggaagtcaaacacaagttttgtaaagactttccgggtttcattccgtcactgctgaaacgtctgctggatgaacgccaggaaatcaaacgtcgcatgaaagcctcgaaggatccgattgaaaagaaaatgctggactatcgtcaacgcgcaatcaaaattctggctaatagctattacggctattacggttatgcgaaggcccgctggtactgcaaagaatgtgcggaatctgtcacggcctggggccgtgaatatatcgaatttgtgcgcaaagaactggaagaaaagttcggtttcaaggttctgtacattgatacggacggcctgtacgcaaccatcccgggtgctaaaccggaagaaattaagcgtaaggccctggaatttgtggaatacatcaacgcaaaactgccgggcctgctggaactggaatatgaaggcttctacgttcgcggctttttcgtcacgaagaaaaagtatgcgctgattgacgaagaaggcaaaatcattacccgtggtctggaaatcgttcgtcgcgattggagtgaaattgccaaagaaacccaggcacgtgttctggaagcactgctgaaagatggtaatgtcgaagaagcagtgagtattgttaaagaagtcacggaaaaactgtccaagtatgaagtcccgccggaaaaactggtgattcatgaacaaatcacccgcgaactgaaagattacaaggcgacgggcccgcacgtggcaattgctaaacgtctggcagcgcgtggcgttaagatccgtccgggtaccgttattagctatatcgtcctgaaaggctctggtcgtattggtgaccgcgccatcccgtttgatgaattcgacccggctaaacaccgctacgatgcggaatattacattgaaaatcaggtcctgccggctgtggaacgtatcctgaaagcgtttggctatcgtaaggaagatctgcgctaccagaaaacccgtcaagtgggcctgggtgcgtggctgaaaccgaagggtaaaaagtaa

SEQ ID NO: 406 - DNA, 2331 bp, Artificial Sequence
  Synthetic
atgatcctggatgcggactacattaccgaagacggcaaaccggtcgtgcgtatcttcaaaaaagaaaacggcgaattcaaaatcgaatatgatcgcaactttgaaccgtatatctacgctctgctgaaagatgactccgcgatcgaagaagtgaagaaaattaccgccgaacgccatggcaaagtggttcgtgtcaaacgcgcagaaaaagtgaagaaaaaatttctgggtcgtccgattgaagtttggaaactgtatttcgaacatccgcaggatgtcccggctatccgtgacaaaattcgcgaacacccggcggtcgtggatatctatgaatacgacattccgtttgctaaacgttatctgatcgataaaggcctgattccgatggaaggtgacgaagaactgaaaatgctggcctttgatattgaaaccctgtatcacgaaggcgaagaattcggcaaaggtccgatcctgatgatttcatacgcagacgaagaagaagcgcgtgtgatcacctggaagaaaattgatctgccgtatgttgaagttgtctcgacggaacgtgaaatgatcaaacgttttctgcgcgtcattaaagaaaaagatccggacgtgctgatcacctataacggcgataattttgacttcgcatacctgaaaaaacgctgcgaaaaactgggtatcaaattcacgctgggccgtgatggtagcgaaccgaaaattcaacgtatgggcgatcgctttgcggtggacgttaaaggtcgcattcatttcgatctgtatccggttatccgtcgcaccattaatctgccgacctatacgctggaagcggtttacgaagccatctttggcaaaccgaaagaaaaagtgtacgccgaagaaattgcagaagcttgggaaaccggcgaaggtctggaacgtgtggcccgctattcaatggaagatgcaaaagttacgtacgaactgggtcgtgaatttttcccgatggaagcgcagctgagccgcctgattggccaaccgctgtgggatgtttctcgtagctctaccggtaacctggtcgaatggttcctgctgcgtaaagcgtatgaacgcaacgaactggcaccgaataaaccggatgaacgtgaatatgaacgtcgcctgcgcgaatcttatgccggcggttacgttaaggaaccggaaaaaggcctgtgggaaggtctggtgtctctggattttcgctcactgtacccgtcgattatcattacgcataacgtgtccccggacaccctgaatcgtgaaggctgcatggaatatgatgttgctccggaagtcaaacacaagttttgtaaagactttccgggtttcattccgtcactgctgaaacgtctgctggatgaacgccaggaaatcaaacgtcgcatgaaagcctcgaaggatccgattgaaaagaaaatgctggactatcgtcaacgcgcaatcaaaattctggctaatagctattacggctattacggttatgcgaaggcccgctggtactgcaaagaatgtgcggaatctgtcacggcctggggccgtgaatatatcgaatttgtgcgcaaagaactggaagaaaagttcggtttcaaggttctgtacattgatacggacggcctgtacgcaaccatcccgggtgctaaaccggaagaaattaagcgtaaggccctggaatttgtggaatacatcaacgcaaaactgccgggcctgctggaactggaatatgaaggcttctacgttcgcggctttttcgtcacgaagaaaaagtatgcgctgattgacgaagaaggcaaaatcattacccgtggtctggaaatcgttcgtcgcgattggagtgaaattgccaaagaaacccaggcacgcgtcctggaagcaatcctgaaagatggtgacgtggaagaagccgtccgtattgtgaaagaagttacggaaaaactgtccaaatatgaagttccgccggaaaaactggtcatccatgaacaaattacccgcgaactgaaagattacaaagcgacgggcccgcacgtcgcaatcgctaaacgtctggcggcgcgtggcgtgaaaattcgtccgggtaccgtgatctcatatattgttctgaaaggctcgggtcgtatcggtgaccgcgctattccgtttgatgaattcgacccgaaaaaacacaaatacgatgcggaatactacatcgaaaaccaggttctgccggccgtcgaacgtattctgcgcgcatttggctaccgtaaagaagatctgcgttatcaaaaaaccaaacaagtgggtctgggtgcgtggctgaaaccgaaaggtaaaaaataa

SEQ ID NO: 407 - DNA, 2328 bp, Artificial Sequence
  Synthetic
atgatcctggatgcggactacattaccgaagacggcaaaccggtcgtgcgtatcttcaaaaaagaaaacggcgaattcaaaatcgaatatgatcgcaactttgaaccgtatatctacgctctgctgaaagatgactccgcgatcgaagaagtgaagaaaattaccgccgaacgccatggcaaagtggttcgtgtcaaacgcgcagaaaaagtgaagaaaaaatttctgggtcgtccgattgaagtttggaaactgtatttcgaacatccgcaggatgtcccggctatccgtgacaaaattcgcgaacacccggcggtcgtggatatctatgaatacgacattccgtttgctaaacgttatctgatcgataaaggcctgattccgatggaaggtgacgaagaactgaaaatgctggcctttgatattgaaaccctgtatcacgaaggcgaagaattcggcaaaggtccgatcctgatgatttcatacgcagacgaagaagaagcgcgtgtgatcacctggaagaaaattgatctgccgtatgttgaagttgtctcgacggaacgtgaaatgatcaaacgttttctgcgcgtcattaaagaaaaagatccggacgtgctgatcacctataacggcgataattttgacttcgcatacctgaaaaaacgctgcgaaaaactgggtatcaaattcacgctgggccgtgatggtagcgaaccgaaaattcaacgtatgggcgatcgctttgcggtggacgttaaaggtcgcattcatttcgatctgtatccggttatccgtcgcaccattaatctgccgacctatacgctggaagcggtttacgaagccatctttggcaaaccgaaagaaaaagtgtacgccgaagaaattgcagaagcttgggaaaccggcgaaggtctggaacgtgtggcccgctattcaatggaagatgcaaaagttacgtacgaactgggtcgtgaatttttcccgatggaagcgcagctgagccgcctgattggccaaccgctgtgggatgtttctcgtagctctaccggtaacctggtcgaatggttcctgctgcgtaaagcgtatgaacgcaacgaactggcaccgaataaaccggatgaacgtgaatatgaacgtcgcctgcgcgaatcttatgccggcggttacgttaaggaaccggaaaaaggcctgtgggaaggtctggtgtctctggattttcgctcactgtacccgtcgattatcattacgcataacgtgtccccggacaccctgaatcgtgaaggctgcatggaatatgatgttgctccggaagtcaaacacaagttttgtaaagactttccgggtttcattccgtcactgctgaaacgtctgctggatgaacgccaggaaatcaaacgtcgcatgaaagcctcgaaggatccgattgaaaagaaaatgctggactatcgtcaacgcgcaatcaaaattctggctaatagctattacggctattacggttatgcgaaggcccgctggtactgcaaagaatgtgcggaatctgtcacggcctggggccgtgaatatatcgaatttgtgcgcaaagaactggaagaaaagttcggtttcaaggttctgtacattgatacggacggcctgtacgcaaccatcccgggtgctaaaccggaagaaattaagcgtaaggccctggaatttgtggaatacatcaacgcaaaactgccgggcctgctggaactggaatatgaaggcttctacgttcgcggctttttcgtcacgaagaaaaagtatgcgctgattgacgaagaaggcaaaatcattacccgtggtctggaaatcgttcgtcgcgattggagtgaaattgccaaagaaacccaggcacgtgttctggaagcaattctgaaacatggtaacgtcgaagaagcggtcaaaatcgtgaaagaagttacggaaaaactgtctaactacgaaattccgccggaaaaactggccatctacgaacaaattacccgcccgctgcatgaatataaagcaatcggtccgcacgtcgcagtggcaaaacgtctggcagcacgcggcgttaaagtcaaaccgggtatggtcatcggctatattgtgctgcgtggtgatggcccgatcagcaaccgcgcaattctggctgaagaatacgatctgaaaaaacacaaatacgacgccgaatattacatcgaaaatcaggttctgccggctgtcctgcgtattctggaagcgtttggctatcgtaaagaagatctgcgctggcagaaaacccgtcaaacgggtctgacctcatggctgaatattaaaaaatcgtaa

SEQ ID NO: 408 - DNA, 2328 bp, Artificial Sequence
  Synthetic
atgatcctggatgcggactacattaccgaagacggcaaaccggtcgtgcgtatcttcaaaaaagaaaacggcgaattcaaaatcgaatatgatcgcaactttgaaccgtatatctacgctctgctgaaagatgactccgcgatcgaagaagtgaagaaaattaccgccgaacgccatggcaaagtggttcgtgtcaaacgcgcagaaaaagtgaagaaaaaatttctgggtcgtccgattgaagtttggaaactgtatttcgaacatccgcaggatgtcccggctatccgtgacaaaattcgcgaacacccggcggtcgtggatatctatgaatacgacattccgtttgctaaacgttatctgatcgataaaggcctgattccgatggaaggtgacgaagaactgaaaatgctggcctttgatattgaaaccctgtatcacgaaggcgaagaattcggcaaaggtccgatcctgatgatttcatacgcagacgaagaagaagcgcgtgtgatcacctggaagaaaattgatctgccgtatgttgaagttgtctcgacggaacgtgaaatgatcaaacgttttctgcgcgtcattaaagaaaaagatccggacgtgctgatcacctataacggcgataattttgacttcgcatacctgaaaaaacgctgcgaaaaactgggtatcaaattcacgctgggccgtgatggtagcgaaccgaaaattcaacgtatgggcgatcgctttgcggtggacgttaaaggtcgcattcatttcgatctgtatccggttatccgtcgcaccattaatctgccgacctatacgctggaagcggtttacgaagccatctttggcaaaccgaaagaaaaagtgtacgccgaagaaattgcagaagcttgggaaaccggcgaaggtctggaacgtgtggcccgctattcaatggaagatgcaaaagttacgtacgaactgggtcgtgaatttttcccgatggaagcgcagctgagccgcctgattggccaaccgctgtgggatgtttctcgtagctctaccggtaacctggtcgaatggttcctgctgcgtaaagcgtatgaacgcaacgaactggcaccgaataaaccggatgaacgtgaatatgaacgtcgcctgcgcgaatcttatgccggcggttacgttaaggaaccggaaaaaggcctgtgggaaggtctggtgtctctggattttcgctcactgtacccgtcgattatcattacgcataacgtgtccccggacaccctgaatcgtgaaggctgcatggaatatgatgttgctccggaagtcaaacacaagttttgtaaagactttccgggtttcattccgtcactgctgaaacgtctgctggatgaacgccaggaaatcaaacgtcgcatgaaagcctcgaaggatccgattgaaaagaaaatgctggactatcgtcaacgcgcaatcaaaattctggctaatagctattacggctattacggttatgcgaaggcccgctggtactgcaaagaatgtgcggaatctgtcacggcctggggccgtgaatatatcgaatttgtgcgcaaagaactggaagaaaagttcggtttcaaggttctgtacattgatacggacggcctgtacgcaaccatcccgggtgctaaaccggaagaaattaagcgtaaggccctggaatttgtggaatacatcaacgcaaaactgccgggcctgctggaactggaatatgaaggcttctacgttcgcggctttttcgtcacgaagaaaaagtatgcgctgattgacgaagaaggcaaaatcattacccgtggtctggaaatcgttcgtcgcgattggagtgaaattgccaaagaaacccaggcaaaagttctggaagcaatcctgaaacatggtaatgtcgaagaagcagtgaaaattgtcaaggaagtgacggaaaaactgtcgaagtatgaaatcccgccggaaaaactggtgatctacgaacaaattacccgcccgctgcatgaatataaagcgattggcccgcacgtggcagttgctaaacgtctggcagcccgcggtgtcaaagtgcgtccgggcatggtgatcggttatattgttctgcgtggcgatggtccgatcagtaaacgcgcgattctggccgaagaatttgatccgcgcaaacacaagtacgacgccgaatattacatcgaaaaccaggtgctgccggctgttctgcgtattctggaagcgttcggctatcgtaaagaagatctgcgctggcagaaaaccaagcaaacgggtctgaccgcatggctgaatgtgaaaaagaaataa

SEQ ID NO: 409 - DNA, 2331 bp, Artificial Sequence
  Synthetic
atgatcctggatgcggactacattaccgaagacggcaaaccggtcgtgcgtatcttcaaaaaagaaaacggcgaattcaaaatcgaatatgatcgcaactttgaaccgtatatctacgctctgctgaaagatgactccgcgatcgaagaagtgaagaaaattaccgccgaacgccatggcaaagtggttcgtgtcaaacgcgcagaaaaagtgaagaaaaaatttctgggtcgtccgattgaagtttggaaactgtatttcgaacatccgcaggatgtcccggctatccgtgacaaaattcgcgaacacccggcggtcgtggatatctatgaatacgacattccgtttgctaaacgttatctgatcgataaaggcctgattccgatggaaggtgacgaagaactgaaaatgctggcctttgatattgaaaccctgtatcacgaaggcgaagaattcggcaaaggtccgatcctgatgatttcatacgcagacgaagaagaagcgcgtgtgatcacctggaagaaaattgatctgccgtatgttgaagttgtctcgacggaacgtgaaatgatcaaacgttttctgcgcgtcattaaagaaaaagatccggacgtgctgatcacctataacggcgataattttgacttcgcatacctgaaaaaacgctgcgaaaaactgggtatcaaattcacgctgggccgtgatggtagcgaaccgaaaattcaacgtatgggcgatcgctttgcggtggacgttaaaggtcgcattcatttcgatctgtatccggttatccgtcgcaccattaatctgccgacctatacgctggaagcggtttacgaagccatctttggcaaaccgaaagaaaaagtgtacgccgaagaaattgcagaagcttgggaaaccggcgaaggtctggaacgtgtggcccgctattcaatggaagatgcaaaagttacgtacgaactgggtcgtgaatttttcccgatggaagcgcagctgagccgcctgattggccaaccgctgtgggatgtttctcgtagctctaccggtaacctggtcgaatggttcctgctgcgtaaagcgtatgaacgcaacgaagtggcaccgaataaaccggatgaacgtgaatatcagcgtcgcctgcgcgaaagttatgcaggcggttacgtgaaagaaccggaaaaaggtctgtgggaaggcctggtttatctggattttcgtgcgctgtacccgagcattatcattacgcataacgtttctccggacaccctgaatcgtgaaggctgccgcgaatatgatattgcgccggaagtgggtcacaaattttgtaaagatatcccgggcttcattccgagcctgctgaaacgtctgctggaagaacgccagaaaatcaaaacgaaaatgaaagaaacccaagatccgatcgaaaaaattctgctggactaccgtcagcgcgcgatcaaaattctggccaacagttattacggttattacggctatgcaaaagctcgctggtactgcaaagaatgtgcagaatccgttaccgcttggggtcgtaaatacatcgaattcgtctggaaagaactggaagaaaaattcggtttcaaagttctgtacatcgatacggacggtctgtacgcaaccatcccgggcggtaaaccggaagaaattaagaaaaaagccctggaatttgtggattacattaatgcaaaactgccgggcctgctggaactggaatatgaaggtttctacgtgcgtggctttttcgttaccaagaaaaaatatgccgtcattgacgaagaaggtaaagtgatcacccgcggcctggaaattgttcgtcgcgattggagtgaaattgccaaagaaacccaggcacgcgttctggaagcaatcctgcgtcatggtgacgtcgaagaagccgttcgcattgtcaaagatgtgacggaaaagctgtcgaaatatgaagtcccgccggaaaaactggtgatccatgaacaaattacccgtgaactgaaggattacaaagcgacgggcccgcacgttgcaattgctaaacgcctggcagcccgtggcatcaagattcgtccgggtaccgttatcagctatattgtcctgaaaggctctggtcgcatcggtgatcgtgctattccgtttgatgaattcgacccgacgaaacaccgttacgatgccgaatattacatcgaaaatcaggtgctgccggccgttgaacgcattctgaaagcatttggctataagaaagaagaactgcgctaccagaaaacccgtcaagtgggcctgggtgcgtggctgaagctgaaaggtaagaaataa

SEQ ID NO: 410 - DNA, 2325 bp, Artificial Sequence
  Synthetic
atgatcctggatgcggactacattaccgaagacggcaaaccggtcgtgcgtatcttcaaaaaagaaaacggcgaattcaaaatcgaatatgatcgcaactttgaaccgtatatctacgctctgctgaaagatgactccgcgatcgaagaagtgaagaaaattaccgccgaacgccatggcaaagtggttcgtgtcaaacgcgcagaaaaagtgaagaaaaaatttctgggtcgtccgattgaagtttggaaactgtatttcgaacatccgcaggatgtcccggctatccgtgacaaaattcgcgaacacccggcggtcgtggatatctatgaatacgacattccgtttgctaaacgttatctgatcgataaaggcctgattccgatggaaggtgacgaagaactgaaaatgctggcctttgatattgaaaccctgtatcacgaaggcgaagaattcggcaaaggtccgatcctgatgatttcatacgcagacgaagaagaagcgcgtgtgatcacctggaagaaaattgatctgccgtatgttgaagttgtctcgacggaacgtgaaatgatcaaacgttttctgcgcgtcattaaagaaaaagatccggacgtgctgatcacctataacggcgataattttgacttcgcatacctgaaaaaacgctgcgaaaaactgggtatcaaattcacgctgggccgtgatggtagcgaaccgaaaattcaacgtatgggcgatcgctttgcggtggacgttaaaggtcgcattcatttcgatctgtatccggttatccgtcgcaccattaatctgccgacctatacgctggaagcggtttacgaagccatctttggcaaaccgaaagaaaaagtgtacgccgaagaaattgcagaagcttgggaaaccggcgaaggtctggaacgtgtggcccgctattcaatggaagatgcaaaagttacgtacgaactgggtcgtgaatttttcccgatggaagcgcagctgagccgcctgattggccaaccgctgtgggatgtttctcgtagctctaccggtaacctggtcgaatggttcctgctgcgtaaagcgtatgaacgcaacgaagtggcaccgaataaaccggatgaacgtgaatatcagcgtcgcctgcgcgaaagttatgcaggcggttacgtgaaagaaccggaaaaaggtctgtgggaaggcctggtttatctggattttcgtgcgctgtacccgagcattatcattacgcataacgtttctccggacaccctgaatcgtgaaggctgccgcgaatatgatattgcgccggaagtgggtcacaaattttgtaaagatatcccgggcttcattccgagcctgctgaaacgtctgctggaagaacgccagaaaatcaaaacgaaaatgaaagaaacccaagatccgatcgaaaaaattctgctggactaccgtcagcgcgcgatcaaaattctggccaacagttattacggttattacggctatgcaaaagctcgctggtactgcaaagaatgtgcagaatccgttaccgcttggggtcgtaaatacatcgaattcgtctggaaagaactggaagaaaaattcggtttcaaagttctgtacatcgatacggacggtctgtacgcaaccatcccgggcggtaaaccggaagaaattaagaaaaaagccctggaatttgtggattacattaatgcaaaactgccgggcctgctggaactggaatatgaaggtttctacgtgcgtggctttttcgttaccaagaaaaaatatgccgtcattgacgaagaaggtaaagtgatcacccgcggcctggaaattgttcgtcgcgattggagtgaaattgccaaagaaacccaggcacgtgtcctggaagcaatcctgaaacatggtgatgtggaagaagcggttcgcattgtcaaagaagtgacggaaaagctgtcgaaatatgaagttccgccggaaaaactggtcatccatgaacaaattacccgcgatctgcgtgactacaaagccacgggtccgcacgtggcagttgcaaaacgtctggcagcccgtggcgtgaagattcgtccgggtaccgtgatcagttatattgttctgaaaggctccggtcgcatcggtgaccgtgctattccgtttgatgaattcgacccgacgaaacaccgttacgatgccgaatattacatcgaaaatcaggtcctgccggccgtggaacgcattctgaaagcatttggttatcgcaaggaagatctgcgttaccagaagaccaaacaagtcggcctgggtgcgtggctgaaagtgaaaaagtaa

SEQ ID NO: 411 - DNA, 2331 bp, Artificial Sequence
  Synthetic
atgatcctggatgcggactacattaccgaagacggcaaaccggtcgtgcgtatcttcaaaaaagaaaacggcgaattcaaaatcgaatatgatcgcaactttgaaccgtatatctacgctctgctgaaagatgactccgcgatcgaagaagtgaagaaaattaccgccgaacgccatggcaaagtggttcgtgtcaaacgcgcagaaaaagtgaagaaaaaatttctgggtcgtccgattgaagtttggaaactgtatttcgaacatccgcaggatgtcccggctatccgtgacaaaattcgcgaacacccggcggtcgtggatatctatgaatacgacattccgtttgctaaacgttatctgatcgataaaggcctgattccgatggaaggtgacgaagaactgaaaatgctggcctttgatattgaaaccctgtatcacgaaggcgaagaattcggcaaaggtccgatcctgatgatttcatacgcagacgaagaagaagcgcgtgtgatcacctggaagaaaattgatctgccgtatgttgaagttgtctcgacggaacgtgaaatgatcaaacgttttctgcgcgtcattaaagaaaaagatccggacgtgctgatcacctataacggcgataattttgacttcgcatacctgaaaaaacgctgcgaaaaactgggtatcaaattcacgctgggccgtgatggtagcgaaccgaaaattcaacgtatgggcgatcgctttgcggtggacgttaaaggtcgcattcatttcgatctgtatccggttatccgtcgcaccattaatctgccgacctatacgctggaagcggtttacgaagccatctttggcaaaccgaaagaaaaagtgtacgccgaagaaattgcagaagcttgggaaaccggcgaaggtctggaacgtgtggcccgctattcaatggaagatgcaaaagttacgtacgaactgggtcgtgaatttttcccgatggaagcgcagctgagccgcctgattggccaaccgctgtgggatgtttctcgtagctctaccggtaacctggtcgaatggttcctgctgcgtaaagcgtatgaacgcaacgaagtggcaccgaataaaccggatgaacgtgaatatcagcgtcgcctgcgcgaaagttatgcaggcggttacgtgaaagaaccggaaaaaggtctgtgggaaggcctggtttatctggattttcgtgcgctgtacccgagcattatcattacgcataacgtttctccggacaccctgaatcgtgaaggctgccgcgaatatgatattgcgccggaagtgggtcacaaattttgtaaagatatcccgggcttcattccgagcctgctgaaacgtctgctggaagaacgccagaaaatcaaaacgaaaatgaaagaaacccaagatccgatcgaaaaaattctgctggactaccgtcagcgcgcgatcaaaattctggccaacagttattacggttattacggctatgcaaaagctcgctggtactgcaaagaatgtgcagaatccgttaccgcttggggtcgtaaatacatcgaattcgtctggaaagaactggaagaaaaattcggtttcaaagttctgtacatcgatacggacggtctgtacgcaaccatcccgggcggtaaaccggaagaaattaagaaaaaagccctggaatttgtggattacattaatgcaaaactgccgggcctgctggaactggaatatgaaggtttctacgtgcgtggctttttcgttaccaagaaaaaatatgccgtcattgacgaagaaggtaaagtgatcacccgcggcctggaaattgttcgtcgcgattggagtgaaattgccaaagaaacccaggcacgtgtgctggaagctctgctgaaagatggcaatgttgaagaagcggtttccattgtcaaagaagtgacggaaaagctgggtaaatatgaagtcccgccggaaaaactggtgatccatgaacaaattacccgcgaactgaaggattacaaagcgacgggcccgcacgttgctatcgcgaaacgtctggcagcgcgtggcgtgaagattcgtccgggtaccgttatcagctatattgtcctgaaaggctctggtcgtatcggtgaccgcgcgattccgtttgatgaattcgacccgacgaaacatcgctacgatgcagaatattacatcgaaaaccaggttctgccggctgtcgaacgtattctgaaagcgtttggctatcgtgccgaagatctgcgctaccagaaaacccgtcaagtgggcctgggtgtttggctgcaaccgaaaggtaagaaataa

SEQ ID NO: 412 - DNA, 2328 bp, Artificial Sequence
  Synthetic
atgatcctggatgcggactacattaccgaagacggcaaaccggtcgtgcgtatcttcaaaaaagaaaacggcgaattcaaaatcgaatatgatcgcaactttgaaccgtatatctacgctctgctgaaagatgactccgcgatcgaagaagtgaagaaaattaccgccgaacgccatggcaaagtggttcgtgtcaaacgcgcagaaaaagtgaagaaaaaatttctgggtcgtccgattgaagtttggaaactgtatttcgaacatccgcaggatgtcccggctatccgtgacaaaattcgcgaacacccggcggtcgtggatatctatgaatacgacattccgtttgctaaacgttatctgatcgataaaggcctgattccgatggaaggtgacgaagaactgaaaatgctggcctttgatattgaaaccctgtatcacgaaggcgaagaattcggcaaaggtccgatcctgatgatttcatacgcagacgaagaagaagcgcgtgtgatcacctggaagaaaattgatctgccgtatgttgaagttgtctcgacggaacgtgaaatgatcaaacgttttctgcgcgtcattaaagaaaaagatccggacgtgctgatcacctataacggcgataattttgacttcgcatacctgaaaaaacgctgcgaaaaactgggtatcaaattcacgctgggccgtgatggtagcgaaccgaaaattcaacgtatgggcgatcgctttgcggtggacgttaaaggtcgcattcatttcgatctgtatccggttatccgtcgcaccattaatctgccgacctatacgctggaagcggtttacgaagccatctttggcaaaccgaaagaaaaagtgtacgccgaagaaattgcagaagcttgggaaaccggcgaaggtctggaacgtgtggcccgctattcaatggaagatgcaaaagttacgtacgaactgggtcgtgaatttttcccgatggaagcgcagctgagccgcctgattggccaaccgctgtgggatgtttctcgtagctctaccggtaacctggtcgaatggttcctgctgcgtaaagcgtatgaacgcaacgaagtggcaccgaataaaccggatgaacgtgaatatcagcgtcgcctgcgcgaaagttatgcaggcggttacgtgaaagaaccggaaaaaggtctgtgggaaggcctggtttatctggattttcgtgcgctgtacccgagcattatcattacgcataacgtttctccggacaccctgaatcgtgaaggctgccgcgaatatgatattgcgccggaagtgggtcacaaattttgtaaagatatcccgggcttcattccgagcctgctgaaacgtctgctggaagaacgccagaaaatcaaaacgaaaatgaaagaaacccaagatccgatcgaaaaaattctgctggactaccgtcagcgcgcgatcaaaattctggccaacagttattacggttattacggctatgcaaaagctcgctggtactgcaaagaatgtgcagaatccgttaccgcttggggtcgtaaatacatcgaattcgtctggaaagaactggaagaaaaattcggtttcaaagttctgtacatcgatacggacggtctgtacgcaaccatcccgggcggtaaaccggaagaaattaagaaaaaagccctggaatttgtggattacattaatgcaaaactgccgggcctgctggaactggaatatgaaggtttctacgtgcgtggctttttcgttaccaagaaaaaatatgccgtcattgacgaagaaggtaaagtgatcacccgcggcctggaaattgttcgtcgcgattggagtgaaattgccaaagaaacccaggcaaaggttctggaagcaattctgaaacatggtaacgtcgaagaagcggtcaagatcgtgaaagaagttaccgaaaaactgtcgaattatgaaattccggtcgaaaagctggtgatctacgaacaaattacgcgcccgctgaacgaatataaagccattggcccgcacgtggcagttgctaaacgtctggcggccaagggtatcaagattaaaccgggcatggtgattggttatgttgtcctgcgcggcgatggtccgatcagcaaacgtgcgatcgccatcgaagaattcgatggcaaaaagcataagtacgacgcagaatactacatcgaaaatcaggttctgccggccgtcgaacgtatcctgaaagcattcggttataagcgtgaagatctgcgctggcagaagaccaaacaagtgggcctgggtgcgtggctgaaagttaaaaagtcttaa

SEQ ID NO: 413 - DNA, 2331 bp, Artificial Sequence
  Synthetic
atgatcctggatgcggactacattaccgaagacggcaaaccggtcgtgcgtatcttcaaaaaagaaaacggcgaattcaaaatcgaatatgatcgcaactttgaaccgtatatctacgctctgctgaaagatgactccgcgatcgaagaagtgaagaaaattaccgccgaacgccatggcaaagtggttcgtgtcaaacgcgcagaaaaagtgaagaaaaaatttctgggtcgtccgattgaagtttggaaactgtatttcgaacatccgcaggatgtcccggctatccgtgacaaaattcgcgaacacccggcggtcgtggatatctatgaatacgacattccgtttgctaaacgttatctgatcgataaaggcctgattccgatggaaggtgacgaagaactgaaaatgctggcctttgatattgaaaccctgtatcacgaaggcgaagaattcggcaaaggtccgatcctgatgatttcatacgcagacgaagaagaagcgcgtgtgatcacctggaagaaaattgatctgccgtatgttgaagttgtctcgacggaacgtgaaatgatcaaacgttttctgcgcgtcattaaagaaaaagatccggacgtgctgatcacctataacggcgataattttgacttcgcatacctgaaaaaacgctgcgaaaaactgggtatcaaattcacgctgggccgtgatggtagcgaaccgaaaattcaacgtatgggcgatcgctttgcggtggacgttaaaggtcgcattcatttcgatctgtatccggttatccgtcgcaccattaatctgccgacctatacgctggaagcggtttacgaagccatctttggcaaaccgaaagaaaaagtgtacgccgaagaaattgcagaagcttgggaaaccggcgaaggtctggaacgtgtggcccgctattcaatggaagatgcaaaagttacgtacgaactgggtcgtgaatttttcccgatggaagcgcagctgagccgcctgattggccaaccgctgtgggatgtttctcgtagctctaccggtaacctggtcgaatggttcctgctgcgtaaagcgtatgaacgcaacgaagtggcaccgaataaaccggatgaacgtgaatatcagcgtcgcctgcgcgaaagttatgcaggcggttacgtgaaagaaccggaaaaaggtctgtgggaaggcctggtttatctggattttcgtgcgctgtacccgagcattatcattacgcataacgtttctccggacaccctgaatcgtgaaggctgccgcgaatatgatattgcgccggaagtgggtcacaaattttgtaaagatatcccgggcttcattccgagcctgctgaaacgtctgctggaagaacgccagaaaatcaaaacgaaaatgaaagaaacccaagatccgatcgaaaaaattctgctggactaccgtcagcgcgcgatcaaaattctggccaacagttattacggttattacggctatgcaaaagctcgctggtactgcaaagaatgtgcagaatccgttaccgcttggggtcgtaaatacatcgaattcgtctggaaagaactggaagaaaaattcggtttcaaagttctgtacatcgatacggacggtctgtacgcaaccatcccgggcggtaaaccggaagaaattaagaaaaaagccctggaatttgtggattacattaatgcaaaactgccgggcctgctggaactggaatatgaaggtttctacgtgcgtggctttttcgttaccaagaaaaaatatgccgtcattgacgaagaaggtaaagtgatcacccgcggcctggaaattgttcgtcgcgattggagtgaaattgccaaagaaacccaggcacgtgttctggaagcactgctgaaagatggtaatgtcgaagaagcagtgagtattgttaaagaagtcacggaaaaactgtccaagtatgaagtcccgccggaaaaactggtgattcatgaacaaatcacccgcgaactgaaagattacaaggcgacgggcccgcacgtggcaattgctaaacgtctggcagcgcgtggcgttaagatccgtccgggtaccgttattagctatatcgtcctgaaaggctctggtcgtattggtgaccgcgccatcccgtttgatgaattcgacccggctaaacaccgctacgatgcggaatattacattgaaaatcaggtcctgccggctgtggaacgtatcctgaaagcgtttggctatcgtaaggaagatctgcgctaccagaaaacccgtcaagtgggcctgggtgcgtggctgaaaccgaagggtaaaaagtaa

SEQ ID NO: 414 - DNA, 2331 bp, Artificial Sequence
  Synthetic
atgatcctggatgcggactacattaccgaagacggcaaaccggtcgtgcgtatcttcaaaaaagaaaacggcgaattcaaaatcgaatatgatcgcaactttgaaccgtatatctacgctctgctgaaagatgactccgcgatcgaagaagtgaagaaaattaccgccgaacgccatggcaaagtggttcgtgtcaaacgcgcagaaaaagtgaagaaaaaatttctgggtcgtccgattgaagtttggaaactgtatttcgaacatccgcaggatgtcccggctatccgtgacaaaattcgcgaacacccggcggtcgtggatatctatgaatacgacattccgtttgctaaacgttatctgatcgataaaggcctgattccgatggaaggtgacgaagaactgaaaatgctggcctttgatattgaaaccctgtatcacgaaggcgaagaattcggcaaaggtccgatcctgatgatttcatacgcagacgaagaagaagcgcgtgtgatcacctggaagaaaattgatctgccgtatgttgaagttgtctcgacggaacgtgaaatgatcaaacgttttctgcgcgtcattaaagaaaaagatccggacgtgctgatcacctataacggcgataattttgacttcgcatacctgaaaaaacgctgcgaaaaactgggtatcaaattcacgctgggccgtgatggtagcgaaccgaaaattcaacgtatgggcgatcgctttgcggtggacgttaaaggtcgcattcatttcgatctgtatccggttatccgtcgcaccattaatctgccgacctatacgctggaagcggtttacgaagccatctttggcaaaccgaaagaaaaagtgtacgccgaagaaattgcagaagcttgggaaaccggcgaaggtctggaacgtgtggcccgctattcaatggaagatgcaaaagttacgtacgaactgggtcgtgaatttttcccgatggaagcgcagctgagccgcctgattggccaaccgctgtgggatgtttctcgtagctctaccggtaacctggtcgaatggttcctgctgcgtaaagcgtatgaacgcaacgaagtggcaccgaataaaccggatgaacgtgaatatcagcgtcgcctgcgcgaaagttatgcaggcggttacgtgaaagaaccggaaaaaggtctgtgggaaggcctggtttatctggattttcgtgcgctgtacccgagcattatcattacgcataacgtttctccggacaccctgaatcgtgaaggctgccgcgaatatgatattgcgccggaagtgggtcacaaattttgtaaagatatcccgggcttcattccgagcctgctgaaacgtctgctggaagaacgccagaaaatcaaaacgaaaatgaaagaaacccaagatccgatcgaaaaaattctgctggactaccgtcagcgcgcgatcaaaattctggccaacagttattacggttattacggctatgcaaaagctcgctggtactgcaaagaatgtgcagaatccgttaccgcttggggtcgtaaatacatcgaattcgtctggaaagaactggaagaaaaattcggtttcaaagttctgtacatcgatacggacggtctgtacgcaaccatcccgggcggtaaaccggaagaaattaagaaaaaagccctggaatttgtggattacattaatgcaaaactgccgggcctgctggaactggaatatgaaggtttctacgtgcgtggctttttcgttaccaagaaaaaatatgccgtcattgacgaagaaggtaaagtgatcacccgcggcctggaaattgttcgtcgcgattggagtgaaattgccaaagaaacccaggcacgcgtcctggaagcaatcctgaaagatggtgacgtggaagaagccgtccgtattgtgaaagaagttacggaaaaactgtccaaatatgaagttccgccggaaaaactggtcatccatgaacaaattacccgcgaactgaaagattacaaagcgacgggcccgcacgtcgcaatcgctaaacgtctggcggcgcgtggcgtgaaaattcgtccgggtaccgtgatctcatatattgttctgaaaggctcgggtcgtatcggtgaccgcgctattccgtttgatgaattcgacccgaaaaaacacaaatacgatgcggaatactacatcgaaaaccaggttctgccggccgtcgaacgtattctgcgcgcatttggctaccgtaaagaagatctgcgttatcaaaaaaccaaacaagtgggtctgggtgcgtggctgaaaccgaaaggtaaaaaataa

SEQ ID NO: 415 - DNA, 2328 bp, Artificial Sequence
  Synthetic
atgatcctggatgcggactacattaccgaagacggcaaaccggtcgtgcgtatcttcaaaaaagaaaacggcgaattcaaaatcgaatatgatcgcaactttgaaccgtatatctacgctctgctgaaagatgactccgcgatcgaagaagtgaagaaaattaccgccgaacgccatggcaaagtggttcgtgtcaaacgcgcagaaaaagtgaagaaaaaatttctgggtcgtccgattgaagtttggaaactgtatttcgaacatccgcaggatgtcccggctatccgtgacaaaattcgcgaacacccggcggtcgtggatatctatgaatacgacattccgtttgctaaacgttatctgatcgataaaggcctgattccgatggaaggtgacgaagaactgaaaatgctggcctttgatattgaaaccctgtatcacgaaggcgaagaattcggcaaaggtccgatcctgatgatttcatacgcagacgaagaagaagcgcgtgtgatcacctggaagaaaattgatctgccgtatgttgaagttgtctcgacggaacgtgaaatgatcaaacgttttctgcgcgtcattaaagaaaaagatccggacgtgctgatcacctataacggcgataattttgacttcgcatacctgaaaaaacgctgcgaaaaactgggtatcaaattcacgctgggccgtgatggtagcgaaccgaaaattcaacgtatgggcgatcgctttgcggtggacgttaaaggtcgcattcatttcgatctgtatccggttatccgtcgcaccattaatctgccgacctatacgctggaagcggtttacgaagccatctttggcaaaccgaaagaaaaagtgtacgccgaagaaattgcagaagcttgggaaaccggcgaaggtctggaacgtgtggcccgctattcaatggaagatgcaaaagttacgtacgaactgggtcgtgaatttttcccgatggaagcgcagctgagccgcctgattggccaaccgctgtgggatgtttctcgtagctctaccggtaacctggtcgaatggttcctgctgcgtaaagcgtatgaacgcaacgaagtggcaccgaataaaccggatgaacgtgaatatcagcgtcgcctgcgcgaaagttatgcaggcggttacgtgaaagaaccggaaaaaggtctgtgggaaggcctggtttatctggattttcgtgcgctgtacccgagcattatcattacgcataacgtttctccggacaccctgaatcgtgaaggctgccgcgaatatgatattgcgccggaagtgggtcacaaattttgtaaagatatcccgggcttcattccgagcctgctgaaacgtctgctggaagaacgccagaaaatcaaaacgaaaatgaaagaaacccaagatccgatcgaaaaaattctgctggactaccgtcagcgcgcgatcaaaattctggccaacagttattacggttattacggctatgcaaaagctcgctggtactgcaaagaatgtgcagaatccgttaccgcttggggtcgtaaatacatcgaattcgtctggaaagaactggaagaaaaattcggtttcaaagttctgtacatcgatacggacggtctgtacgcaaccatcccgggcggtaaaccggaagaaattaagaaaaaagccctggaatttgtggattacattaatgcaaaactgccgggcctgctggaactggaatatgaaggtttctacgtgcgtggctttttcgttaccaagaaaaaatatgccgtcattgacgaagaaggtaaagtgatcacccgcggcctggaaattgttcgtcgcgattggagtgaaattgccaaagaaacccaggcacgtgttctggaagcaattctgaaacatggtaacgtcgaagaagcggtcaaaatcgtgaaagaagttacggaaaaactgtctaactacgaaattccgccggaaaaactggccatctacgaacaaattacccgcccgctgcatgaatataaagcaatcggtccgcacgtcgcagtggcaaaacgtctggcagcacgcggcgttaaagtcaaaccgggtatggtcatcggctatattgtgctgcgtggtgatggcccgatcagcaaccgcgcaattctggctgaagaatacgatctgaaaaaacacaaatacgacgccgaatattacatcgaaaatcaggttctgccggctgtcctgcgtattctggaagcgtttggctatcgtaaagaagatctgcgctggcagaaaacccgtcaaacgggtctgacctcatggctgaatattaaaaaatcgtaa

SEQ ID NO: 416 - DNA, 2328 bp, Artificial Sequence
  Synthetic
atgatcctggatgcggactacattaccgaagacggcaaaccggtcgtgcgtatcttcaaaaaagaaaacggcgaattcaaaatcgaatatgatcgcaactttgaaccgtatatctacgctctgctgaaagatgactccgcgatcgaagaagtgaagaaaattaccgccgaacgccatggcaaagtggttcgtgtcaaacgcgcagaaaaagtgaagaaaaaatttctgggtcgtccgattgaagtttggaaactgtatttcgaacatccgcaggatgtcccggctatccgtgacaaaattcgcgaacacccggcggtcgtggatatctatgaatacgacattccgtttgctaaacgttatctgatcgataaaggcctgattccgatggaaggtgacgaagaactgaaaatgctggcctttgatattgaaaccctgtatcacgaaggcgaagaattcggcaaaggtccgatcctgatgatttcatacgcagacgaagaagaagcgcgtgtgatcacctggaagaaaattgatctgccgtatgttgaagttgtctcgacggaacgtgaaatgatcaaacgttttctgcgcgtcattaaagaaaaagatccggacgtgctgatcacctataacggcgataattttgacttcgcatacctgaaaaaacgctgcgaaaaactgggtatcaaattcacgctgggccgtgatggtagcgaaccgaaaattcaacgtatgggcgatcgctttgcggtggacgttaaaggtcgcattcatttcgatctgtatccggttatccgtcgcaccattaatctgccgacctatacgctggaagcggtttacgaagccatctttggcaaaccgaaagaaaaagtgtacgccgaagaaattgcagaagcttgggaaaccggcgaaggtctggaacgtgtggcccgctattcaatggaagatgcaaaagttacgtacgaactgggtcgtgaatttttcccgatggaagcgcagctgagccgcctgattggccaaccgctgtgggatgtttctcgtagctctaccggtaacctggtcgaatggttcctgctgcgtaaagcgtatgaacgcaacgaagtggcaccgaataaaccggatgaacgtgaatatcagcgtcgcctgcgcgaaagttatgcaggcggttacgtgaaagaaccggaaaaaggtctgtgggaaggcctggtttatctggattttcgtgcgctgtacccgagcattatcattacgcataacgtttctccggacaccctgaatcgtgaaggctgccgcgaatatgatattgcgccggaagtgggtcacaaattttgtaaagatatcccgggcttcattccgagcctgctgaaacgtctgctggaagaacgccagaaaatcaaaacgaaaatgaaagaaacccaagatccgatcgaaaaaattctgctggactaccgtcagcgcgcgatcaaaattctggccaacagttattacggttattacggctatgcaaaagctcgctggtactgcaaagaatgtgcagaatccgttaccgcttggggtcgtaaatacatcgaattcgtctggaaagaactggaagaaaaattcggtttcaaagttctgtacatcgatacggacggtctgtacgcaaccatcccgggcggtaaaccggaagaaattaagaaaaaagccctggaatttgtggattacattaatgcaaaactgccgggcctgctggaactggaatatgaaggtttctacgtgcgtggctttttcgttaccaagaaaaaatatgccgtcattgacgaagaaggtaaagtgatcacccgcggcctggaaattgttcgtcgcgattggagtgaaattgccaaagaaacccaggcaaaagttctggaagcaatcctgaaacatggtaatgtcgaagaagcagtgaaaattgtcaaggaagtgacggaaaaactgtcgaagtatgaaatcccgccggaaaaactggtgatctacgaacaaattacccgcccgctgcatgaatataaagcgattggcccgcacgtggcagttgctaaacgtctggcagcccgcggtgtcaaagtgcgtccgggcatggtgatcggttatattgttctgcgtggcgatggtccgatcagtaaacgcgcgattctggccgaagaatttgatccgcgcaaacacaagtacgacgccgaatattacatcgaaaaccaggtgctgccggctgttctgcgtattctggaagcgttcggctatcgtaaagaagatctgcgctggcagaaaaccaagcaaacgggtctgaccgcatggctgaatgtgaaaaagaaataa

SEQ ID NO: 417 - DNA, 2328 bp, Artificial Sequence
  Synthetic
atgatcctggatgcggactacattaccgaagacggcaaaccggtcgtgcgtatcttcaaaaaagaaaacggcgaattcaaaatcgaatatgatcgcaactttgaaccgtatatctacgctctgctgaaagatgactccgcgatcgaagaagtgaagaaaattaccgccgaacgccatggcaaagtggttcgtgtcaaacgcgcagaaaaagtgaagaaaaaatttctgggtcgtccgattgaagtttggaaactgtatttcgaacatccgcaggatgtcccggctatccgtgacaaaattcgcgaacacccggcggtcgtggatatctatgaatacgacattccgtttgctaaacgttatctgatcgataaaggcctgattccgatggaaggtgacgaagaactgaaaatgctggcctttgatattgaaaccctgtatcacgaaggcgaagaattcggcaaaggtccgatcctgatgatttcatacgcagacgaagaagaagcgcgtgtgatcacctggaagaaaattgatctgccgtatgttgaagttgtctcgacggaacgtgaaatgatcaaacgttttctgcgcgtcattaaagaaaaagatccggacgtgctgatcacctataacggcgataattttgacttcgcatacctgaaaaaacgctgcgaaaaactgggtatcaaattcacgctgggccgtgatggtagcgaaccgaaaattcaacgtatgggcgatcgctttgcggtggacgttaaaggtcgcattcatttcgatctgtatccggttatccgtcgcaccattaatctgccgacctatacgctggaagcggtttacgaagccatctttggcaaaccgaaagaaaaagtgtacgccgaagaaattgcagaagcttgggaaaccggcgaaggtctggaacgtgtggcccgctattcaatggaagatgcaaaagttacgtacgaactgggtcgtgaatttttcccgatggaagcgcagctgagccgcctgattggccaaccgctgtgggatgtttctcgtagctctaccggtaacctggtcgaatggttcctgctgcgtaaagcgtatgaacgcaacgaactggcgccgaataaaccggatgaaaaggaactggcacgtcgccgtggcggttatgcaggcggttacgtcaaagaaccggaacgtggcctgtgggataatattgtgtatctggactttcgcagtctgtacccgtccattatcattacccataacgttagtccggacacgctgaatcgcgaaggctgcaaagaatatgatgtggccccggaagttggtcacaagttctgtaaagactttccgggcttcatcccgtccctgctgggtgatctgctggaagaacgccagaagattaagcgtaagatgaaagcaaccgttgatccgctggaaaagaaactgctggactatcgccaacgtgcgatcaaaattctggccaacagctattacggctattacggttatgcgaaagcccgctggtactgccgtgaatgtgcagaatctgtgaccgcttggggccgcgaatatattgaaaccacgatccgtgaaatcgaagaaaagttcggtttcaaggttctgtacgctgataccgacggctttttcgcgacgatcccgggtgcagatgctgaaaccgtgaaaaagaaagctaaggaattcctgaagtacatcaacgcgaaactgccgggcctgctggaactggaatatgaaggcttctacgttcgtggctttttcgtcacgaagaaaaagtacgcggttatcgacgaagaaggcaaaattaccacgcgcggtctggaaatcgtgcgccgtgattggagtgaaattgccaaagaaacccaggcacgcgttctggaagcaatcctgcgtcatggtgacgtcgaagaagccgttcgcattgtcaaagatgtgacggaaaagctgtcgaaatatgaagtcccgccggaaaaactggtgatccatgaacaaattacccgtgaactgaaggattacaaagcgacgggcccgcacgttgcaattgctaaacgcctggcagcccgtggcatcaagattcgtccgggtaccgttatcagctatattgtcctgaaaggctctggtcgcatcggtgatcgtgctattccgtttgatgaattcgacccgacgaaacaccgttacgatgccgaatattacatcgaaaatcaggtgctgccggccgttgaacgcattctgaaagcatttggctataagaaagaagaactgcgctaccagaaaacccgtcaagtgggcctgggtgcgtggctgaagctgaaaggtaagaaataa

SEQ ID NO: 418 - DNA, 2322 bp, Artificial Sequence
  Synthetic
atgatcctggatgcggactacattaccgaagacggcaaaccggtcgtgcgtatcttcaaaaaagaaaacggcgaattcaaaatcgaatatgatcgcaactttgaaccgtatatctacgctctgctgaaagatgactccgcgatcgaagaagtgaagaaaattaccgccgaacgccatggcaaagtggttcgtgtcaaacgcgcagaaaaagtgaagaaaaaatttctgggtcgtccgattgaagtttggaaactgtatttcgaacatccgcaggatgtcccggctatccgtgacaaaattcgcgaacacccggcggtcgtggatatctatgaatacgacattccgtttgctaaacgttatctgatcgataaaggcctgattccgatggaaggtgacgaagaactgaaaatgctggcctttgatattgaaaccctgtatcacgaaggcgaagaattcggcaaaggtccgatcctgatgatttcatacgcagacgaagaagaagcgcgtgtgatcacctggaagaaaattgatctgccgtatgttgaagttgtctcgacggaacgtgaaatgatcaaacgttttctgcgcgtcattaaagaaaaagatccggacgtgctgatcacctataacggcgataattttgacttcgcatacctgaaaaaacgctgcgaaaaactgggtatcaaattcacgctgggccgtgatggtagcgaaccgaaaattcaacgtatgggcgatcgctttgcggtggacgttaaaggtcgcattcatttcgatctgtatccggttatccgtcgcaccattaatctgccgacctatacgctggaagcggtttacgaagccatctttggcaaaccgaaagaaaaagtgtacgccgaagaaattgcagaagcttgggaaaccggcgaaggtctggaacgtgtggcccgctattcaatggaagatgcaaaagttacgtacgaactgggtcgtgaatttttcccgatggaagcgcagctgagccgcctgattggccaaccgctgtgggatgtttctcgtagctctaccggtaacctggtcgaatggttcctgctgcgtaaagcgtatgaacgcaacgaactggcgccgaataaaccggatgaaaaggaactggcacgtcgccgtggcggttatgcaggcggttacgtcaaagaaccggaacgtggcctgtgggataatattgtgtatctggactttcgcagtctgtacccgtccattatcattacccataacgttagtccggacacgctgaatcgcgaaggctgcaaagaatatgatgtggccccggaagttggtcacaagttctgtaaagactttccgggcttcatcccgtccctgctgggtgatctgctggaagaacgccagaagattaagcgtaagatgaaagcaaccgttgatccgctggaaaagaaactgctggactatcgccaacgtgcgatcaaaattctggccaacagctattacggctattacggttatgcgaaagcccgctggtactgccgtgaatgtgcagaatctgtgaccgcttggggccgcgaatatattgaaaccacgatccgtgaaatcgaagaaaagttcggtttcaaggttctgtacgctgataccgacggctttttcgcgacgatcccgggtgcagatgctgaaaccgtgaaaaagaaagctaaggaattcctgaagtacatcaacgcgaaactgccgggcctgctggaactggaatatgaaggcttctacgttcgtggctttttcgtcacgaagaaaaagtacgcggttatcgacgaagaaggcaaaattaccacgcgcggtctggaaatcgtgcgccgtgattggagtgaaattgccaaagaaacccaggcacgtgtcctggaagcaatcctgaaacatggtgatgtggaagaagcggttcgcattgtcaaagaagtgacggaaaagctgtcgaaatatgaagttccgccggaaaaactggtcatccatgaacaaattacccgcgatctgcgtgactacaaagccacgggtccgcacgtggcagttgcaaaacgtctggcagcccgtggcgtgaagattcgtccgggtaccgtgatcagttatattgttctgaaaggctccggtcgcatcggtgaccgtgctattccgtttgatgaattcgacccgacgaaacaccgttacgatgccgaatattacatcgaaaatcaggtcctgccggccgtggaacgcattctgaaagcatttggttatcgcaaggaagatctgcgttaccagaagaccaaacaagtcggcctgggtgcgtggctgaaagtgaaaaagtaa

SEQ ID NO: 419 - DNA, 2328 bp, Artificial Sequence
  Synthetic
atgatcctggatgcggactacattaccgaagacggcaaaccggtcgtgcgtatcttcaaaaaagaaaacggcgaattcaaaatcgaatatgatcgcaactttgaaccgtatatctacgctctgctgaaagatgactccgcgatcgaagaagtgaagaaaattaccgccgaacgccatggcaaagtggttcgtgtcaaacgcgcagaaaaagtgaagaaaaaatttctgggtcgtccgattgaagtttggaaactgtatttcgaacatccgcaggatgtcccggctatccgtgacaaaattcgcgaacacccggcggtcgtggatatctatgaatacgacattccgtttgctaaacgttatctgatcgataaaggcctgattccgatggaaggtgacgaagaactgaaaatgctggcctttgatattgaaaccctgtatcacgaaggcgaagaattcggcaaaggtccgatcctgatgatttcatacgcagacgaagaagaagcgcgtgtgatcacctggaagaaaattgatctgccgtatgttgaagttgtctcgacggaacgtgaaatgatcaaacgttttctgcgcgtcattaaagaaaaagatccggacgtgctgatcacctataacggcgataattttgacttcgcatacctgaaaaaacgctgcgaaaaactgggtatcaaattcacgctgggccgtgatggtagcgaaccgaaaattcaacgtatgggcgatcgctttgcggtggacgttaaaggtcgcattcatttcgatctgtatccggttatccgtcgcaccattaatctgccgacctatacgctggaagcggtttacgaagccatctttggcaaaccgaaagaaaaagtgtacgccgaagaaattgcagaagcttgggaaaccggcgaaggtctggaacgtgtggcccgctattcaatggaagatgcaaaagttacgtacgaactgggtcgtgaatttttcccgatggaagcgcagctgagccgcctgattggccaaccgctgtgggatgtttctcgtagctctaccggtaacctggtcgaatggttcctgctgcgtaaagcgtatgaacgcaacgaactggcgccgaataaaccggatgaaaaggaactggcacgtcgccgtggcggttatgcaggcggttacgtcaaagaaccggaacgtggcctgtgggataatattgtgtatctggactttcgcagtctgtacccgtccattatcattacccataacgttagtccggacacgctgaatcgcgaaggctgcaaagaatatgatgtggccccggaagttggtcacaagttctgtaaagactttccgggcttcatcccgtccctgctgggtgatctgctggaagaacgccagaagattaagcgtaagatgaaagcaaccgttgatccgctggaaaagaaactgctggactatcgccaacgtgcgatcaaaattctggccaacagctattacggctattacggttatgcgaaagcccgctggtactgccgtgaatgtgcagaatctgtgaccgcttggggccgcgaatatattgaaaccacgatccgtgaaatcgaagaaaagttcggtttcaaggttctgtacgctgataccgacggctttttcgcgacgatcccgggtgcagatgctgaaaccgtgaaaaagaaagctaaggaattcctgaagtacatcaacgcgaaactgccgggcctgctggaactggaatatgaaggcttctacgttcgtggctttttcgtcacgaagaaaaagtacgcggttatcgacgaagaaggcaaaattaccacgcgcggtctggaaatcgtgcgccgtgattggagtgaaattgccaaagaaacccaggcacgtgtgctggaagctctgctgaaagatggcaatgttgaagaagcggtttccattgtcaaagaagtgacggaaaagctgggtaaatatgaagtcccgccggaaaaactggtgatccatgaacaaattacccgcgaactgaaggattacaaagcgacgggcccgcacgttgctatcgcgaaacgtctggcagcgcgtggcgtgaagattcgtccgggtaccgttatcagctatattgtcctgaaaggctctggtcgtatcggtgaccgcgcgattccgtttgatgaattcgacccgacgaaacatcgctacgatgcagaatattacatcgaaaaccaggttctgccggctgtcgaacgtattctgaaagcgtttggctatcgtgccgaagatctgcgctaccagaaaacccgtcaagtgggcctgggtgtttggctgcaaccgaaaggtaagaaataa

SEQ ID NO: 420 - DNA, 2325 bp, Artificial Sequence
  Synthetic
atgatcctggatgcggactacattaccgaagacggcaaaccggtcgtgcgtatcttcaaaaaagaaaacggcgaattcaaaatcgaatatgatcgcaactttgaaccgtatatctacgctctgctgaaagatgactccgcgatcgaagaagtgaagaaaattaccgccgaacgccatggcaaagtggttcgtgtcaaacgcgcagaaaaagtgaagaaaaaatttctgggtcgtccgattgaagtttggaaactgtatttcgaacatccgcaggatgtcccggctatccgtgacaaaattcgcgaacacccggcggtcgtggatatctatgaatacgacattccgtttgctaaacgttatctgatcgataaaggcctgattccgatggaaggtgacgaagaactgaaaatgctggcctttgatattgaaaccctgtatcacgaaggcgaagaattcggcaaaggtccgatcctgatgatttcatacgcagacgaagaagaagcgcgtgtgatcacctggaagaaaattgatctgccgtatgttgaagttgtctcgacggaacgtgaaatgatcaaacgttttctgcgcgtcattaaagaaaaagatccggacgtgctgatcacctataacggcgataattttgacttcgcatacctgaaaaaacgctgcgaaaaactgggtatcaaattcacgctgggccgtgatggtagcgaaccgaaaattcaacgtatgggcgatcgctttgcggtggacgttaaaggtcgcattcatttcgatctgtatccggttatccgtcgcaccattaatctgccgacctatacgctggaagcggtttacgaagccatctttggcaaaccgaaagaaaaagtgtacgccgaagaaattgcagaagcttgggaaaccggcgaaggtctggaacgtgtggcccgctattcaatggaagatgcaaaagttacgtacgaactgggtcgtgaatttttcccgatggaagcgcagctgagccgcctgattggccaaccgctgtgggatgtttctcgtagctctaccggtaacctggtcgaatggttcctgctgcgtaaagcgtatgaacgcaacgaactggcgccgaataaaccggatgaaaaggaactggcacgtcgccgtggcggttatgcaggcggttacgtcaaagaaccggaacgtggcctgtgggataatattgtgtatctggactttcgcagtctgtacccgtccattatcattacccataacgttagtccggacacgctgaatcgcgaaggctgcaaagaatatgatgtggccccggaagttggtcacaagttctgtaaagactttccgggcttcatcccgtccctgctgggtgatctgctggaagaacgccagaagattaagcgtaagatgaaagcaaccgttgatccgctggaaaagaaactgctggactatcgccaacgtgcgatcaaaattctggccaacagctattacggctattacggttatgcgaaagcccgctggtactgccgtgaatgtgcagaatctgtgaccgcttggggccgcgaatatattgaaaccacgatccgtgaaatcgaagaaaagttcggtttcaaggttctgtacgctgataccgacggctttttcgcgacgatcccgggtgcagatgctgaaaccgtgaaaaagaaagctaaggaattcctgaagtacatcaacgcgaaactgccgggcctgctggaactggaatatgaaggcttctacgttcgtggctttttcgtcacgaagaaaaagtacgcggttatcgacgaagaaggcaaaattaccacgcgcggtctggaaatcgtgcgccgtgattggagtgaaattgccaaagaaacccaggcaaaggttctggaagcaattctgaaacatggtaacgtcgaagaagcggtcaagatcgtgaaagaagttaccgaaaaactgtcgaattatgaaattccggtcgaaaagctggtgatctacgaacaaattacgcgcccgctgaacgaatataaagccattggcccgcacgtggcagttgctaaacgtctggcggccaagggtatcaagattaaaccgggcatggtgattggttatgttgtcctgcgcggcgatggtccgatcagcaaacgtgcgatcgccatcgaagaattcgatggcaaaaagcataagtacgacgcagaatactacatcgaaaatcaggttctgccggccgtcgaacgtatcctgaaagcattcggttataagcgtgaagatctgcgctggcagaagaccaaacaagtgggcctgggtgcgtggctgaaagttaaaaagtcttaa

SEQ ID NO: 421 - DNA, 2328 bp, Artificial Sequence
  Synthetic
atgatcctggatgcggactacattaccgaagacggcaaaccggtcgtgcgtatcttcaaaaaagaaaacggcgaattcaaaatcgaatatgatcgcaactttgaaccgtatatctacgctctgctgaaagatgactccgcgatcgaagaagtgaagaaaattaccgccgaacgccatggcaaagtggttcgtgtcaaacgcgcagaaaaagtgaagaaaaaatttctgggtcgtccgattgaagtttggaaactgtatttcgaacatccgcaggatgtcccggctatccgtgacaaaattcgcgaacacccggcggtcgtggatatctatgaatacgacattccgtttgctaaacgttatctgatcgataaaggcctgattccgatggaaggtgacgaagaactgaaaatgctggcctttgatattgaaaccctgtatcacgaaggcgaagaattcggcaaaggtccgatcctgatgatttcatacgcagacgaagaagaagcgcgtgtgatcacctggaagaaaattgatctgccgtatgttgaagttgtctcgacggaacgtgaaatgatcaaacgttttctgcgcgtcattaaagaaaaagatccggacgtgctgatcacctataacggcgataattttgacttcgcatacctgaaaaaacgctgcgaaaaactgggtatcaaattcacgctgggccgtgatggtagcgaaccgaaaattcaacgtatgggcgatcgctttgcggtggacgttaaaggtcgcattcatttcgatctgtatccggttatccgtcgcaccattaatctgccgacctatacgctggaagcggtttacgaagccatctttggcaaaccgaaagaaaaagtgtacgccgaagaaattgcagaagcttgggaaaccggcgaaggtctggaacgtgtggcccgctattcaatggaagatgcaaaagttacgtacgaactgggtcgtgaatttttcccgatggaagcgcagctgagccgcctgattggccaaccgctgtgggatgtttctcgtagctctaccggtaacctggtcgaatggttcctgctgcgtaaagcgtatgaacgcaacgaactggcgccgaataaaccggatgaaaaggaactggcacgtcgccgtggcggttatgcaggcggttacgtcaaagaaccggaacgtggcctgtgggataatattgtgtatctggactttcgcagtctgtacccgtccattatcattacccataacgttagtccggacacgctgaatcgcgaaggctgcaaagaatatgatgtggccccggaagttggtcacaagttctgtaaagactttccgggcttcatcccgtccctgctgggtgatctgctggaagaacgccagaagattaagcgtaagatgaaagcaaccgttgatccgctggaaaagaaactgctggactatcgccaacgtgcgatcaaaattctggccaacagctattacggctattacggttatgcgaaagcccgctggtactgccgtgaatgtgcagaatctgtgaccgcttggggccgcgaatatattgaaaccacgatccgtgaaatcgaagaaaagttcggtttcaaggttctgtacgctgataccgacggctttttcgcgacgatcccgggtgcagatgctgaaaccgtgaaaaagaaagctaaggaattcctgaagtacatcaacgcgaaactgccgggcctgctggaactggaatatgaaggcttctacgttcgtggctttttcgtcacgaagaaaaagtacgcggttatcgacgaagaaggcaaaattaccacgcgcggtctggaaatcgtgcgccgtgattggagtgaaattgccaaagaaacccaggcacgtgttctggaagcactgctgaaagatggtaatgtcgaagaagcagtgagtattgttaaagaagtcacggaaaaactgtccaagtatgaagtcccgccggaaaaactggtgattcatgaacaaatcacccgcgaactgaaagattacaaggcgacgggcccgcacgtggcaattgctaaacgtctggcagcgcgtggcgttaagatccgtccgggtaccgttattagctatatcgtcctgaaaggctctggtcgtattggtgaccgcgccatcccgtttgatgaattcgacccggctaaacaccgctacgatgcggaatattacattgaaaatcaggtcctgccggctgtggaacgtatcctgaaagcgtttggctatcgtaaggaagatctgcgctaccagaaaacccgtcaagtgggcctgggtgcgtggctgaaaccgaagggtaaaaagtaa

SEQ ID NO: 422 - DNA, 2328 bp, Artificial Sequence
  Synthetic
atgatcctggatgcggactacattaccgaagacggcaaaccggtcgtgcgtatcttcaaaaaagaaaacggcgaattcaaaatcgaatatgatcgcaactttgaaccgtatatctacgctctgctgaaagatgactccgcgatcgaagaagtgaagaaaattaccgccgaacgccatggcaaagtggttcgtgtcaaacgcgcagaaaaagtgaagaaaaaatttctgggtcgtccgattgaagtttggaaactgtatttcgaacatccgcaggatgtcccggctatccgtgacaaaattcgcgaacacccggcggtcgtggatatctatgaatacgacattccgtttgctaaacgttatctgatcgataaaggcctgattccgatggaaggtgacgaagaactgaaaatgctggcctttgatattgaaaccctgtatcacgaaggcgaagaattcggcaaaggtccgatcctgatgatttcatacgcagacgaagaagaagcgcgtgtgatcacctggaagaaaattgatctgccgtatgttgaagttgtctcgacggaacgtgaaatgatcaaacgttttctgcgcgtcattaaagaaaaagatccggacgtgctgatcacctataacggcgataattttgacttcgcatacctgaaaaaacgctgcgaaaaactgggtatcaaattcacgctgggccgtgatggtagcgaaccgaaaattcaacgtatgggcgatcgctttgcggtggacgttaaaggtcgcattcatttcgatctgtatccggttatccgtcgcaccattaatctgccgacctatacgctggaagcggtttacgaagccatctttggcaaaccgaaagaaaaagtgtacgccgaagaaattgcagaagcttgggaaaccggcgaaggtctggaacgtgtggcccgctattcaatggaagatgcaaaagttacgtacgaactgggtcgtgaatttttcccgatggaagcgcagctgagccgcctgattggccaaccgctgtgggatgtttctcgtagctctaccggtaacctggtcgaatggttcctgctgcgtaaagcgtatgaacgcaacgaactggcgccgaataaaccggatgaaaaggaactggcacgtcgccgtggcggttatgcaggcggttacgtcaaagaaccggaacgtggcctgtgggataatattgtgtatctggactttcgcagtctgtacccgtccattatcattacccataacgttagtccggacacgctgaatcgcgaaggctgcaaagaatatgatgtggccccggaagttggtcacaagttctgtaaagactttccgggcttcatcccgtccctgctgggtgatctgctggaagaacgccagaagattaagcgtaagatgaaagcaaccgttgatccgctggaaaagaaactgctggactatcgccaacgtgcgatcaaaattctggccaacagctattacggctattacggttatgcgaaagcccgctggtactgccgtgaatgtgcagaatctgtgaccgcttggggccgcgaatatattgaaaccacgatccgtgaaatcgaagaaaagttcggtttcaaggttctgtacgctgataccgacggctttttcgcgacgatcccgggtgcagatgctgaaaccgtgaaaaagaaagctaaggaattcctgaagtacatcaacgcgaaactgccgggcctgctggaactggaatatgaaggcttctacgttcgtggctttttcgtcacgaagaaaaagtacgcggttatcgacgaagaaggcaaaattaccacgcgcggtctggaaatcgtgcgccgtgattggagtgaaattgccaaagaaacccaggcacgcgtcctggaagcaatcctgaaagatggtgacgtggaagaagccgtccgtattgtgaaagaagttacggaaaaactgtccaaatatgaagttccgccggaaaaactggtcatccatgaacaaattacccgcgaactgaaagattacaaagcgacgggcccgcacgtcgcaatcgctaaacgtctggcggcgcgtggcgtgaaaattcgtccgggtaccgtgatctcatatattgttctgaaaggctcgggtcgtatcggtgaccgcgctattccgtttgatgaattcgacccgaaaaaacacaaatacgatgcggaatactacatcgaaaaccaggttctgccggccgtcgaacgtattctgcgcgcatttggctaccgtaaagaagatctgcgttatcaaaaaaccaaacaagtgggtctgggtgcgtggctgaaaccgaaaggtaaaaaataa

SEQ ID NO: 423 - DNA, 2325 bp, Artificial Sequence
  Synthetic
atgatcctggatgcggactacattaccgaagacggcaaaccggtcgtgcgtatcttcaaaaaagaaaacggcgaattcaaaatcgaatatgatcgcaactttgaaccgtatatctacgctctgctgaaagatgactccgcgatcgaagaagtgaagaaaattaccgccgaacgccatggcaaagtggttcgtgtcaaacgcgcagaaaaagtgaagaaaaaatttctgggtcgtccgattgaagtttggaaactgtatttcgaacatccgcaggatgtcccggctatccgtgacaaaattcgcgaacacccggcggtcgtggatatctatgaatacgacattccgtttgctaaacgttatctgatcgataaaggcctgattccgatggaaggtgacgaagaactgaaaatgctggcctttgatattgaaaccctgtatcacgaaggcgaagaattcggcaaaggtccgatcctgatgatttcatacgcagacgaagaagaagcgcgtgtgatcacctggaagaaaattgatctgccgtatgttgaagttgtctcgacggaacgtgaaatgatcaaacgttttctgcgcgtcattaaagaaaaagatccggacgtgctgatcacctataacggcgataattttgacttcgcatacctgaaaaaacgctgcgaaaaactgggtatcaaattcacgctgggccgtgatggtagcgaaccgaaaattcaacgtatgggcgatcgctttgcggtggacgttaaaggtcgcattcatttcgatctgtatccggttatccgtcgcaccattaatctgccgacctatacgctggaagcggtttacgaagccatctttggcaaaccgaaagaaaaagtgtacgccgaagaaattgcagaagcttgggaaaccggcgaaggtctggaacgtgtggcccgctattcaatggaagatgcaaaagttacgtacgaactgggtcgtgaatttttcccgatggaagcgcagctgagccgcctgattggccaaccgctgtgggatgtttctcgtagctctaccggtaacctggtcgaatggttcctgctgcgtaaagcgtatgaacgcaacgaactggcgccgaataaaccggatgaaaaggaactggcacgtcgccgtggcggttatgcaggcggttacgtcaaagaaccggaacgtggcctgtgggataatattgtgtatctggactttcgcagtctgtacccgtccattatcattacccataacgttagtccggacacgctgaatcgcgaaggctgcaaagaatatgatgtggccccggaagttggtcacaagttctgtaaagactttccgggcttcatcccgtccctgctgggtgatctgctggaagaacgccagaagattaagcgtaagatgaaagcaaccgttgatccgctggaaaagaaactgctggactatcgccaacgtgcgatcaaaattctggccaacagctattacggctattacggttatgcgaaagcccgctggtactgccgtgaatgtgcagaatctgtgaccgcttggggccgcgaatatattgaaaccacgatccgtgaaatcgaagaaaagttcggtttcaaggttctgtacgctgataccgacggctttttcgcgacgatcccgggtgcagatgctgaaaccgtgaaaaagaaagctaaggaattcctgaagtacatcaacgcgaaactgccgggcctgctggaactggaatatgaaggcttctacgttcgtggctttttcgtcacgaagaaaaagtacgcggttatcgacgaagaaggcaaaattaccacgcgcggtctggaaatcgtgcgccgtgattggagtgaaattgccaaagaaacccaggcacgtgttctggaagcaattctgaaacatggtaacgtcgaagaagcggtcaaaatcgtgaaagaagttacggaaaaactgtctaactacgaaattccgccggaaaaactggccatctacgaacaaattacccgcccgctgcatgaatataaagcaatcggtccgcacgtcgcagtggcaaaacgtctggcagcacgcggcgttaaagtcaaaccgggtatggtcatcggctatattgtgctgcgtggtgatggcccgatcagcaaccgcgcaattctggctgaagaatacgatctgaaaaaacacaaatacgacgccgaatattacatcgaaaatcaggttctgccggctgtcctgcgtattctggaagcgtttggctatcgtaaagaagatctgcgctggcagaaaacccgtcaaacgggtctgacctcatggctgaatattaaaaaatcgtaa

SEQ ID NO: 424 - DNA, 2325 bp, Artificial Sequence
  Synthetic
atgatcctggatgcggactacattaccgaagacggcaaaccggtcgtgcgtatcttcaaaaaagaaaacggcgaattcaaaatcgaatatgatcgcaactttgaaccgtatatctacgctctgctgaaagatgactccgcgatcgaagaagtgaagaaaattaccgccgaacgccatggcaaagtggttcgtgtcaaacgcgcagaaaaagtgaagaaaaaatttctgggtcgtccgattgaagtttggaaactgtatttcgaacatccgcaggatgtcccggctatccgtgacaaaattcgcgaacacccggcggtcgtggatatctatgaatacgacattccgtttgctaaacgttatctgatcgataaaggcctgattccgatggaaggtgacgaagaactgaaaatgctggcctttgatattgaaaccctgtatcacgaaggcgaagaattcggcaaaggtccgatcctgatgatttcatacgcagacgaagaagaagcgcgtgtgatcacctggaagaaaattgatctgccgtatgttgaagttgtctcgacggaacgtgaaatgatcaaacgttttctgcgcgtcattaaagaaaaagatccggacgtgctgatcacctataacggcgataattttgacttcgcatacctgaaaaaacgctgcgaaaaactgggtatcaaattcacgctgggccgtgatggtagcgaaccgaaaattcaacgtatgggcgatcgctttgcggtggacgttaaaggtcgcattcatttcgatctgtatccggttatccgtcgcaccattaatctgccgacctatacgctggaagcggtttacgaagccatctttggcaaaccgaaagaaaaagtgtacgccgaagaaattgcagaagcttgggaaaccggcgaaggtctggaacgtgtggcccgctattcaatggaagatgcaaaagttacgtacgaactgggtcgtgaatttttcccgatggaagcgcagctgagccgcctgattggccaaccgctgtgggatgtttctcgtagctctaccggtaacctggtcgaatggttcctgctgcgtaaagcgtatgaacgcaacgaactggcgccgaataaaccggatgaaaaggaactggcacgtcgccgtggcggttatgcaggcggttacgtcaaagaaccggaacgtggcctgtgggataatattgtgtatctggactttcgcagtctgtacccgtccattatcattacccataacgttagtccggacacgctgaatcgcgaaggctgcaaagaatatgatgtggccccggaagttggtcacaagttctgtaaagactttccgggcttcatcccgtccctgctgggtgatctgctggaagaacgccagaagattaagcgtaagatgaaagcaaccgttgatccgctggaaaagaaactgctggactatcgccaacgtgcgatcaaaattctggccaacagctattacggctattacggttatgcgaaagcccgctggtactgccgtgaatgtgcagaatctgtgaccgcttggggccgcgaatatattgaaaccacgatccgtgaaatcgaagaaaagttcggtttcaaggttctgtacgctgataccgacggctttttcgcgacgatcccgggtgcagatgctgaaaccgtgaaaaagaaagctaaggaattcctgaagtacatcaacgcgaaactgccgggcctgctggaactggaatatgaaggcttctacgttcgtggctttttcgtcacgaagaaaaagtacgcggttatcgacgaagaaggcaaaattaccacgcgcggtctggaaatcgtgcgccgtgattggagtgaaattgccaaagaaacccaggcaaaagttctggaagcaatcctgaaacatggtaatgtcgaagaagcagtgaaaattgtcaaggaagtgacggaaaaactgtcgaagtatgaaatcccgccggaaaaactggtgatctacgaacaaattacccgcccgctgcatgaatataaagcgattggcccgcacgtggcagttgctaaacgtctggcagcccgcggtgtcaaagtgcgtccgggcatggtgatcggttatattgttctgcgtggcgatggtccgatcagtaaacgcgcgattctggccgaagaatttgatccgcgcaaacacaagtacgacgccgaatattacatcgaaaaccaggtgctgccggctgttctgcgtattctggaagcgttcggctatcgtaaagaagatctgcgctggcagaaaaccaagcaaacgggtctgaccgcatggctgaatgtgaaaaagaaataa

SEQ ID NO: 425 - DNA, 2328 bp, Artificial Sequence
  Synthetic
atgatcctggatgcggactacattaccgaagacggcaaaccggtcgtgcgtatcttcaaaaaagaaaacggcgaattcaaaatcgaatatgatcgcaactttgaaccgtatatctacgctctgctgaaagatgactccgcgatcgaagaagtgaagaaaattaccgccgaacgccatggcaaagtggttcgtgtcaaacgcgcagaaaaagtgaagaaaaaatttctgggtcgtccgattgaagtttggaaactgtatttcgaacatccgcaggatgtcccggctatccgtgacaaaattcgcgaacacccggcggtcgtggatatctatgaatacgacattccgtttgctaaacgttatctgatcgataaaggcctgattccgatggaaggtgacgaagaactgaaaatgctggcctttgatattgaaaccctgtatcacgaaggcgaagaattcggcaaaggtccgatcctgatgatttcatacgcagacgaagaagaagcgcgtgtgatcacctggaagaaaattgatctgccgtatgttgaagttgtctcgacggaacgtgaaatgatcaaacgttttctgcgcgtcattaaagaaaaagatccggacgtgctgatcacctataacggcgataattttgacttcgcatacctgaaaaaacgctgcgaaaaactgggtatcaaattcacgctgggccgtgatggtagcgaaccgaaaattcaacgtatgggcgatcgctttgcggtggacgttaaaggtcgcattcatttcgatctgtatccggttatccgtcgcaccattaatctgccgacctatacgctggaagcggtttacgaagccatctttggcaaaccgaaagaaaaagtgtacgccgaagaaattgcagaagcttgggaaaccggcgaaggtctggaacgtgtggcccgctattcaatggaagatgcaaaagttacgtacgaactgggtcgtgaatttttcccgatggaagcgcagctgagccgcctgattggccaaccgctgtgggatgtttctcgtagctctaccggtaacctggtcgaatggttcctgctgcgtaaagcgtatgaacgcaacgaaattgcgccgaataaaccggatgaacgtgaactggcacgtcgccgtggcggttatgcaggcggttacgttaaagaaccggaacgcggcctgtgggataatatcgtctatctggactttatgagtctgtacccgtccattatcattacccataacgttagtccggacacgttcaatcgtgaaggctgcaaagaatatgataccgccccgcaggttggtcacaagttttgtaaagacgtccaaggcttcattccgagtctgctgggtgccctgctggatgaacgccagaaaatcaagaaacgtatgaaggcatccattgatccgctggaaaagaaactgctggactatcgccaaaaggcgatcaaaattctggccaactcatattacggctattacggttatgcacgcgctcgttggtactgcaaagaatgtgcagaatcggtgaccgcttggggccgtgattatattgaaaccacgatccacgaaattgaagaacgctttggtttcaaagttctgtacgctgataccgacggctttttcgcgacgatcccgggtgcggatgccgaaaccgtgaagaaaaaggctaaggaattcctgaagtacatcaacgcgaaactgccgggcctgctggaactggaatatgaaggcttctacgtccgtggctttttcgtgaccaaaaagaaatacgcggttatcgacgaagaaggcaaaattaccacgcgcggtctggaaatcgtgcgccgtgattggagtgaaattgccaaagaaacccaggcacgcgttctggaagcaatcctgcgtcatggtgacgtcgaagaagccgttcgcattgtcaaagatgtgacggaaaagctgtcgaaatatgaagtcccgccggaaaaactggtgatccatgaacaaattacccgtgaactgaaggattacaaagcgacgggcccgcacgttgcaattgctaaacgcctggcagcccgtggcatcaagattcgtccgggtaccgttatcagctatattgtcctgaaaggctctggtcgcatcggtgatcgtgctattccgtttgatgaattcgacccgacgaaacaccgttacgatgccgaatattacatcgaaaatcaggtgctgccggccgttgaacgcattctgaaagcatttggctataagaaagaagaactgcgctaccagaaaacccgtcaagtgggcctgggtgcgtggctgaagctgaaaggtaagaaataa

SEQ ID NO: 426 - DNA, 2322 bp, Artificial Sequence
  Synthetic
atgatcctggatgcggactacattaccgaagacggcaaaccggtcgtgcgtatcttcaaaaaagaaaacggcgaattcaaaatcgaatatgatcgcaactttgaaccgtatatctacgctctgctgaaagatgactccgcgatcgaagaagtgaagaaaattaccgccgaacgccatggcaaagtggttcgtgtcaaacgcgcagaaaaagtgaagaaaaaatttctgggtcgtccgattgaagtttggaaactgtatttcgaacatccgcaggatgtcccggctatccgtgacaaaattcgcgaacacccggcggtcgtggatatctatgaatacgacattccgtttgctaaacgttatctgatcgataaaggcctgattccgatggaaggtgacgaagaactgaaaatgctggcctttgatattgaaaccctgtatcacgaaggcgaagaattcggcaaaggtccgatcctgatgatttcatacgcagacgaagaagaagcgcgtgtgatcacctggaagaaaattgatctgccgtatgttgaagttgtctcgacggaacgtgaaatgatcaaacgttttctgcgcgtcattaaagaaaaagatccggacgtgctgatcacctataacggcgataattttgacttcgcatacctgaaaaaacgctgcgaaaaactgggtatcaaattcacgctgggccgtgatggtagcgaaccgaaaattcaacgtatgggcgatcgctttgcggtggacgttaaaggtcgcattcatttcgatctgtatccggttatccgtcgcaccattaatctgccgacctatacgctggaagcggtttacgaagccatctttggcaaaccgaaagaaaaagtgtacgccgaagaaattgcagaagcttgggaaaccggcgaaggtctggaacgtgtggcccgctattcaatggaagatgcaaaagttacgtacgaactgggtcgtgaatttttcccgatggaagcgcagctgagccgcctgattggccaaccgctgtgggatgtttctcgtagctctaccggtaacctggtcgaatggttcctgctgcgtaaagcgtatgaacgcaacgaaattgcgccgaataaaccggatgaacgtgaactggcacgtcgccgtggcggttatgcaggcggttacgttaaagaaccggaacgcggcctgtgggataatatcgtctatctggactttatgagtctgtacccgtccattatcattacccataacgttagtccggacacgttcaatcgtgaaggctgcaaagaatatgataccgccccgcaggttggtcacaagttttgtaaagacgtccaaggcttcattccgagtctgctgggtgccctgctggatgaacgccagaaaatcaagaaacgtatgaaggcatccattgatccgctggaaaagaaactgctggactatcgccaaaaggcgatcaaaattctggccaactcatattacggctattacggttatgcacgcgctcgttggtactgcaaagaatgtgcagaatcggtgaccgcttggggccgtgattatattgaaaccacgatccacgaaattgaagaacgctttggtttcaaagttctgtacgctgataccgacggctttttcgcgacgatcccgggtgcggatgccgaaaccgtgaagaaaaaggctaaggaattcctgaagtacatcaacgcgaaactgccgggcctgctggaactggaatatgaaggcttctacgtccgtggctttttcgtgaccaaaaagaaatacgcggttatcgacgaagaaggcaaaattaccacgcgcggtctggaaatcgtgcgccgtgattggagtgaaattgccaaagaaacccaggcacgtgtcctggaagcaatcctgaaacatggtgatgtggaagaagcggttcgcattgtcaaagaagtgacggaaaagctgtcgaaatatgaagttccgccggaaaaactggtcatccatgaacaaattacccgcgatctgcgtgactacaaagccacgggtccgcacgtggcagttgcaaaacgtctggcagcccgtggcgtgaagattcgtccgggtaccgtgatcagttatattgttctgaaaggctccggtcgcatcggtgaccgtgctattccgtttgatgaattcgacccgacgaaacaccgttacgatgccgaatattacatcgaaaatcaggtcctgccggccgtggaacgcattctgaaagcatttggttatcgcaaggaagatctgcgttaccagaagaccaaacaagtcggcctgggtgcgtggctgaaagtgaaaaagtaa

SEQ ID NO: 427 - DNA, 2328 bp, Artificial Sequence
  Synthetic
atgatcctggatgcggactacattaccgaagacggcaaaccggtcgtgcgtatcttcaaaaaagaaaacggcgaattcaaaatcgaatatgatcgcaactttgaaccgtatatctacgctctgctgaaagatgactccgcgatcgaagaagtgaagaaaattaccgccgaacgccatggcaaagtggttcgtgtcaaacgcgcagaaaaagtgaagaaaaaatttctgggtcgtccgattgaagtttggaaactgtatttcgaacatccgcaggatgtcccggctatccgtgacaaaattcgcgaacacccggcggtcgtggatatctatgaatacgacattccgtttgctaaacgttatctgatcgataaaggcctgattccgatggaaggtgacgaagaactgaaaatgctggcctttgatattgaaaccctgtatcacgaaggcgaagaattcggcaaaggtccgatcctgatgatttcatacgcagacgaagaagaagcgcgtgtgatcacctggaagaaaattgatctgccgtatgttgaagttgtctcgacggaacgtgaaatgatcaaacgttttctgcgcgtcattaaagaaaaagatccggacgtgctgatcacctataacggcgataattttgacttcgcatacctgaaaaaacgctgcgaaaaactgggtatcaaattcacgctgggccgtgatggtagcgaaccgaaaattcaacgtatgggcgatcgctttgcggtggacgttaaaggtcgcattcatttcgatctgtatccggttatccgtcgcaccattaatctgccgacctatacgctggaagcggtttacgaagccatctttggcaaaccgaaagaaaaagtgtacgccgaagaaattgcagaagcttgggaaaccggcgaaggtctggaacgtgtggcccgctattcaatggaagatgcaaaagttacgtacgaactgggtcgtgaatttttcccgatggaagcgcagctgagccgcctgattggccaaccgctgtgggatgtttctcgtagctctaccggtaacctggtcgaatggttcctgctgcgtaaagcgtatgaacgcaacgaaattgcgccgaataaaccggatgaacgtgaactggcacgtcgccgtggcggttatgcaggcggttacgttaaagaaccggaacgcggcctgtgggataatatcgtctatctggactttatgagtctgtacccgtccattatcattacccataacgttagtccggacacgttcaatcgtgaaggctgcaaagaatatgataccgccccgcaggttggtcacaagttttgtaaagacgtccaaggcttcattccgagtctgctgggtgccctgctggatgaacgccagaaaatcaagaaacgtatgaaggcatccattgatccgctggaaaagaaactgctggactatcgccaaaaggcgatcaaaattctggccaactcatattacggctattacggttatgcacgcgctcgttggtactgcaaagaatgtgcagaatcggtgaccgcttggggccgtgattatattgaaaccacgatccacgaaattgaagaacgctttggtttcaaagttctgtacgctgataccgacggctttttcgcgacgatcccgggtgcggatgccgaaaccgtgaagaaaaaggctaaggaattcctgaagtacatcaacgcgaaactgccgggcctgctggaactggaatatgaaggcttctacgtccgtggctttttcgtgaccaaaaagaaatacgcggttatcgacgaagaaggcaaaattaccacgcgcggtctggaaatcgtgcgccgtgattggagtgaaattgccaaagaaacccaggcacgtgtgctggaagctctgctgaaagatggcaatgttgaagaagcggtttccattgtcaaagaagtgacggaaaagctgggtaaatatgaagtcccgccggaaaaactggtgatccatgaacaaattacccgcgaactgaaggattacaaagcgacgggcccgcacgttgctatcgcgaaacgtctggcagcgcgtggcgtgaagattcgtccgggtaccgttatcagctatattgtcctgaaaggctctggtcgtatcggtgaccgcgcgattccgtttgatgaattcgacccgacgaaacatcgctacgatgcagaatattacatcgaaaaccaggttctgccggctgtcgaacgtattctgaaagcgtttggctatcgtgccgaagatctgcgctaccagaaaacccgtcaagtgggcctgggtgtttggctgcaaccgaaaggtaagaaataa

SEQ ID NO: 428 - DNA, 2325 bp, Artificial Sequence
  Synthetic
atgatcctggatgcggactacattaccgaagacggcaaaccggtcgtgcgtatcttcaaaaaagaaaacggcgaattcaaaatcgaatatgatcgcaactttgaaccgtatatctacgctctgctgaaagatgactccgcgatcgaagaagtgaagaaaattaccgccgaacgccatggcaaagtggttcgtgtcaaacgcgcagaaaaagtgaagaaaaaatttctgggtcgtccgattgaagtttggaaactgtatttcgaacatccgcaggatgtcccggctatccgtgacaaaattcgcgaacacccggcggtcgtggatatctatgaatacgacattccgtttgctaaacgttatctgatcgataaaggcctgattccgatggaaggtgacgaagaactgaaaatgctggcctttgatattgaaaccctgtatcacgaaggcgaagaattcggcaaaggtccgatcctgatgatttcatacgcagacgaagaagaagcgcgtgtgatcacctggaagaaaattgatctgccgtatgttgaagttgtctcgacggaacgtgaaatgatcaaacgttttctgcgcgtcattaaagaaaaagatccggacgtgctgatcacctataacggcgataattttgacttcgcatacctgaaaaaacgctgcgaaaaactgggtatcaaattcacgctgggccgtgatggtagcgaaccgaaaattcaacgtatgggcgatcgctttgcggtggacgttaaaggtcgcattcatttcgatctgtatccggttatccgtcgcaccattaatctgccgacctatacgctggaagcggtttacgaagccatctttggcaaaccgaaagaaaaagtgtacgccgaagaaattgcagaagcttgggaaaccggcgaaggtctggaacgtgtggcccgctattcaatggaagatgcaaaagttacgtacgaactgggtcgtgaatttttcccgatggaagcgcagctgagccgcctgattggccaaccgctgtgggatgtttctcgtagctctaccggtaacctggtcgaatggttcctgctgcgtaaagcgtatgaacgcaacgaaattgcgccgaataaaccggatgaacgtgaactggcacgtcgccgtggcggttatgcaggcggttacgttaaagaaccggaacgcggcctgtgggataatatcgtctatctggactttatgagtctgtacccgtccattatcattacccataacgttagtccggacacgttcaatcgtgaaggctgcaaagaatatgataccgccccgcaggttggtcacaagttttgtaaagacgtccaaggcttcattccgagtctgctgggtgccctgctggatgaacgccagaaaatcaagaaacgtatgaaggcatccattgatccgctggaaaagaaactgctggactatcgccaaaaggcgatcaaaattctggccaactcatattacggctattacggttatgcacgcgctcgttggtactgcaaagaatgtgcagaatcggtgaccgcttggggccgtgattatattgaaaccacgatccacgaaattgaagaacgctttggtttcaaagttctgtacgctgataccgacggctttttcgcgacgatcccgggtgcggatgccgaaaccgtgaagaaaaaggctaaggaattcctgaagtacatcaacgcgaaactgccgggcctgctggaactggaatatgaaggcttctacgtccgtggctttttcgtgaccaaaaagaaatacgcggttatcgacgaagaaggcaaaattaccacgcgcggtctggaaatcgtgcgccgtgattggagtgaaattgccaaagaaacccaggcaaaggttctggaagcaattctgaaacatggtaacgtcgaagaagcggtcaagatcgtgaaagaagttaccgaaaaactgtcgaattatgaaattccggtcgaaaagctggtgatctacgaacaaattacgcgcccgctgaacgaatataaagccattggcccgcacgtggcagttgctaaacgtctggcggccaagggtatcaagattaaaccgggcatggtgattggttatgttgtcctgcgcggcgatggtccgatcagcaaacgtgcgatcgccatcgaagaattcgatggcaaaaagcataagtacgacgcagaatactacatcgaaaatcaggttctgccggccgtcgaacgtatcctgaaagcattcggttataagcgtgaagatctgcgctggcagaagaccaaacaagtgggcctgggtgcgtggctgaaagttaaaaagtcttaa

SEQ ID NO: 429 - DNA, 2328 bp, Artificial Sequence
  Synthetic
atgatcctggatgcggactacattaccgaagacggcaaaccggtcgtgcgtatcttcaaaaaagaaaacggcgaattcaaaatcgaatatgatcgcaactttgaaccgtatatctacgctctgctgaaagatgactccgcgatcgaagaagtgaagaaaattaccgccgaacgccatggcaaagtggttcgtgtcaaacgcgcagaaaaagtgaagaaaaaatttctgggtcgtccgattgaagtttggaaactgtatttcgaacatccgcaggatgtcccggctatccgtgacaaaattcgcgaacacccggcggtcgtggatatctatgaatacgacattccgtttgctaaacgttatctgatcgataaaggcctgattccgatggaaggtgacgaagaactgaaaatgctggcctttgatattgaaaccctgtatcacgaaggcgaagaattcggcaaaggtccgatcctgatgatttcatacgcagacgaagaagaagcgcgtgtgatcacctggaagaaaattgatctgccgtatgttgaagttgtctcgacggaacgtgaaatgatcaaacgttttctgcgcgtcattaaagaaaaagatccggacgtgctgatcacctataacggcgataattttgacttcgcatacctgaaaaaacgctgcgaaaaactgggtatcaaattcacgctgggccgtgatggtagcgaaccgaaaattcaacgtatgggcgatcgctttgcggtggacgttaaaggtcgcattcatttcgatctgtatccggttatccgtcgcaccattaatctgccgacctatacgctggaagcggtttacgaagccatctttggcaaaccgaaagaaaaagtgtacgccgaagaaattgcagaagcttgggaaaccggcgaaggtctggaacgtgtggcccgctattcaatggaagatgcaaaagttacgtacgaactgggtcgtgaatttttcccgatggaagcgcagctgagccgcctgattggccaaccgctgtgggatgtttctcgtagctctaccggtaacctggtcgaatggttcctgctgcgtaaagcgtatgaacgcaacgaaattgcgccgaataaaccggatgaacgtgaactggcacgtcgccgtggcggttatgcaggcggttacgttaaagaaccggaacgcggcctgtgggataatatcgtctatctggactttatgagtctgtacccgtccattatcattacccataacgttagtccggacacgttcaatcgtgaaggctgcaaagaatatgataccgccccgcaggttggtcacaagttttgtaaagacgtccaaggcttcattccgagtctgctgggtgccctgctggatgaacgccagaaaatcaagaaacgtatgaaggcatccattgatccgctggaaaagaaactgctggactatcgccaaaaggcgatcaaaattctggccaactcatattacggctattacggttatgcacgcgctcgttggtactgcaaagaatgtgcagaatcggtgaccgcttggggccgtgattatattgaaaccacgatccacgaaattgaagaacgctttggtttcaaagttctgtacgctgataccgacggctttttcgcgacgatcccgggtgcggatgccgaaaccgtgaagaaaaaggctaaggaattcctgaagtacatcaacgcgaaactgccgggcctgctggaactggaatatgaaggcttctacgtccgtggctttttcgtgaccaaaaagaaatacgcggttatcgacgaagaaggcaaaattaccacgcgcggtctggaaatcgtgcgccgtgattggagtgaaattgccaaagaaacccaggcacgtgttctggaagcactgctgaaagatggtaatgtcgaagaagcagtgagtattgttaaagaagtcacggaaaaactgtccaagtatgaagtcccgccggaaaaactggtgattcatgaacaaatcacccgcgaactgaaagattacaaggcgacgggcccgcacgtggcaattgctaaacgtctggcagcgcgtggcgttaagatccgtccgggtaccgttattagctatatcgtcctgaaaggctctggtcgtattggtgaccgcgccatcccgtttgatgaattcgacccggctaaacaccgctacgatgcggaatattacattgaaaatcaggtcctgccggctgtggaacgtatcctgaaagcgtttggctatcgtaaggaagatctgcgctaccagaaaacccgtcaagtgggcctgggtgcgtggctgaaaccgaagggtaaaaagtaa

SEQ ID NO: 430 - DNA, 2538 bp, Artificial Sequence
  Synthetic
atgatcttagatgcagattatatcacggaagaaggcaaaccagtgattcgcctgtttaaaaaagaaaatggcgaatttaaaatcgaacatgatcgcacctttcgcgaatatatctatgccctgctgaaagatgatagtaaaatcgaagaagttaagaaaatcacagcggaacgtcatggtaaaattgttcgcatcgttgatgcggaaaaagttgaaaagaaatttctgggtcgtcctattacagtttggcgtctgtattttgaacatcctcaggatgttccgacgattcgcgaaaaaatccgcgaacatagcgccgttgtggacatatttgaatatgatattccgtttgccaaacgctatctgattgataaaggtttaatccctatggaaggcgatgaagaactgaaactgttagcgtttgacatcgaaaccctgtatcatgaaggtgaagaatttggcaaaggcccgatcatcatgatctcttatgcagatgaagaagaagctaaagtgatcacttggaagaagatcgatttaccgtatgttgaagttgtgtctagtgaacgcgaaatgatcaaacgctttctgaaaatcattcgcgaaaaagatccggatattatcattacctataatggtgatagctttgatttaccttatttagccaaacgtgccgaaaaactgggcatcaaactgacgatcggtcgtgatggtagcgaacctaaaatgcagcgcatcggcgatatgacagcagttgaagttaaaggtcgcatccattttgatctgtatcatgttattcgtcgtacaatcaatttaccgacctataccctggaagcagtgtatgaagccatctttggtaaacctaaagaaaaagtgtatgcggatgaaattgctaaagcttgggaaacgggcgaaggcttagaacgcgttgctaaatatagcatggaagatgccaaagctacctatgaactgggcaaagaatttttccctatggaagctcagctgagtcgtctggtgggtcagcctctgtgggatgtgagtcgtagtagtacgggcaatttagtggaatggtttctgctgcgcaaagcctatgaacgtaatgaattagcacctaacaaaccggatgaacgcgaatatgaacgccgcctgcgtgaatcttatgcaggcggttttgttaaagaaccggaaaaaggcctgtgggaaaatattgtgtctctggattttcgtgcactgtatccgagcatcatcattacacataatgtgtctccagataccctgaatcgcgaaggttgtcgtaattatgatgttgctccggaagtgggtcataaattttgcaaagattttccaggttttattccgagtctgctgaaacgcttactggatgaacgtcagaaaatcaaaaccaaaatgaaagcctcacaggatcctatcgaaaaaatcatgttagattatcgtcagcgtgccatcaaaattctggccaatagctattatggctattatggctatgctaaagctcgctggtattgcaaagaatgcgccgaatcagtgaccgcttggggtcgcgaatatatcgaatttgtgtggaaagaactggaagaaaaatttggctttaaagttctgtatatcgataccgatggcctgtatgcgaccattccgggtggtaaatctgaagaaattaagaagaaggccttagaatttgtggattatattaatgccaaactgccgggcctgctggaactggaatatgaaggcttttataaacgcggcttcttcgtgaccaagaaaaaatatgcactgatcgatgaagaaggtaaaatcattacacgcggcttagaaattgtgcgccgcgattggagcgaaattgccaaagaaacccaggcccgcgttctggaagccatcctgaaacatggtaatgtggaagaagcagttcgcattgttaaagaagtgacacagaaactgagcaaatatgaaatcccaccggaaaaactggccatctatgaacagattacacgtccactgcatgaatataaagccattggtccacatgttgcggttgccaaacgcttagccgctaaaggtgttaaaatcaaaccaggcatggttatcggctatattgttctgcgcggcgatggtccgatctctaatcgtgccatcttagcggaagaatatgatccacgcaaacataaatatgatgccgaatattatatcgaaaatcaggtgttaccagcagtgctgcgcattctggaaggctttggctatcgcaaagaagatttacgttggcagaaaaccaaacagacgggcctgacaagttggctgaatattaaaaaatcaggtacgggcggtggcggtgctacggttaaatttaaatataaaggcgaagaaaaagaagtggatattagtaaaatcaaaaaagtttggcgtgtgggcaaaatgatctctttcacttatgatgaaggcggcggcaaaaccggccgcggtgccgtgagcgaaaaagatgctcctaaagaactgttgcaaatgttagaaaaacagaaaaaaaattaa

SEQ ID NO: 431 - DNA, 2538 bp, Artificial Sequence
  Synthetic
atgatcttagatgcagattatatcacggaagaaggcaaaccagtgattcgcctgtttaaaaaagaaaatggcgaatttaaaatcgaacatgatcgcacctttcgccattatatctatgccctgctgaaagatgatagtaaaatcgaagaagttaagaaaatcacagcggaacgtcatggtaaaattgttcgcatcgttgatgcggaaaaagttgaaaagaaatttctgggtcgtcctattacagtttggcgtctgtattttgaacatcctcaggatgttccgacgattcgcgaaaaaatccgcgaacatagcgccgttgtggacatatttgaatatgatattccgtttgccaaacgctatctgattgataaaggtttaatccctatggaaggcgatgaagaactgaaactgttagcgtttgacatcgaaaccctgtatcatgaaggtgaagaatttggcaaaggcccgatcatcatgatctcttatgcagatgaagaagaagctaaagtgatcacttggaagaagatcgatttaccgtatgttgaagttgtgtctagtgaacgcgaaatgatcaaacgctttctgaaaatcattcgcgaaaaagatccggatattatcattacctataatggtgatagctttgatttaccttatttagccaaacgtgccgaaaaactgggcatcaaactgacgatcggtcgtgatggtagcgaacctaaaatgcagcgcatcggcgatatgacagcagttgaagttaaaggtcgcatccattttgatctgtatcatgttattcgtcgtacaatcaatttaccgacctataccctggaagcagtgtatgaagccatctttggtaaacctaaagaaaaagtgtatgcggatgaaattgctaaagcttgggaaacgggcgaaggcttagaacgcgttgctaaatatagcatggaagatgccaaagctacctatgaactgggcaaagaatttttccctatggaagctcagctgagtcgtctggtgggtcagcctctgtgggatgtgagtcgtagtagtacgggcaatttagtggaatggtttctgctgcgcaaagcctatgaacgtaatgaattagcacctaacaaaccggatgaacgcgaatatgaacgccgcctgcgtgaatcttatgcaggcggttttgttaaagaaccggaaaaaggcctgtgggaaaatattgtgtctctggattttcgtgcactgtatccgagcatcatcattacacataatgtgtctccagataccctgaatcgcgaaggttgtcgtaattatgatgttgctccggaagtgggtcataaattttgcaaagattttccaggttttattccgagtctgctgaaacgcttactggatgaacgtcagaaaatcaaaaccaaaatgaaagcctcacaggatcctatcgaaaaaatcatgttagattatcgtcagcgtgccatcaaaattctggccaatagctattatggctattatggctatgctaaagctcgctggtattgcaaagaatgcgccgaatcagtgaccgcttggggtcgcgaatatatcgaatttgtgtggaaagaactggaagaaaaatttggctttaaagttctgtatatcgataccgatggcctgtatgcgaccattccgggtggtaaatctgaagaaattaagaagaaggccttagaatttgtggattatattaatgccaaactgccgggcctgctggaactggaatatgaaggcttttataaacgcggcttcttcgtgaccaagaaaaaatatgcactgatcgatgaagaaggtaaaatcattacacgcggcttagaaattgtgcgccgcgattggagcgaaattgccaaagaaacccaggcccgcgttctggaagccatcctgaaacatggtaatgtggaagaagcagttcgcattgttaaagaagtgacacagaaactgagcaaatatgaaatcccaccggaaaaactggccatctatgaacagattacacgtccactgcatgaatataaagccattggtccacatgttgcggttgccaaacgcttagccgctaaaggtgttaaaatcaaaccaggcatggttatcggctatattgttctgcgcggcgatggtccgatctctaatcgtgccatcttagcggaagaatatgatccacgcaaacataaatatgatgccgaatattatatcgaaaatcaggtgttaccagcagtgctgcgcattctggaaggctttggctatcgcaaagaagatttacgttggcagaaaaccaaacagacgggcctgacaagttggctgaatattaaaaaatcaggtacgggcggtggcggtgctacggttaaatttaaatataaaggcgaagaaaaagaagtggatattagtaaaatcaaaaaagtttggcgtgtgggcaaaatgatctctttcacttatgatgaaggcggcggcaaaaccggccgcggtgccgtgagcgaaaaagatgctcctaaagaactgttgcaaatgttagaaaaacagaaaaaaaattaa

SEQ ID NO: 432 - DNA, 2538 bp, Artificial Sequence
  Synthetic
atgatcttagatgcagattatatcacggaagaaggcaaaccagtgattcgcctgtttaaaaaagaaaatggcgaatttaaaatcgaacatgatcgcacctttcgcatgtatatctatgccctgctgaaagatgatagtaaaatcgaagaagttaagaaaatcacagcggaacgtcatggtaaaattgttcgcatcgttgatgcggaaaaagttgaaaagaaatttctgggtcgtcctattacagtttggcgtctgtattttgaacatcctcaggatgttccgacgattcgcgaaaaaatccgcgaacatagcgccgttgtggacatatttgaatatgatattccgtttgccaaacgctatctgattgataaaggtttaatccctatggaaggcgatgaagaactgaaactgttagcgtttgacatcgaaaccctgtatcatgaaggtgaagaatttggcaaaggcccgatcatcatgatctcttatgcagatgaagaagaagctaaagtgatcacttggaagaagatcgatttaccgtatgttgaagttgtgtctagtgaacgcgaaatgatcaaacgctttctgaaaatcattcgcgaaaaagatccggatattatcattacctataatggtgatagctttgatttaccttatttagccaaacgtgccgaaaaactgggcatcaaactgacgatcggtcgtgatggtagcgaacctaaaatgcagcgcatcggcgatatgacagcagttgaagttaaaggtcgcatccattttgatctgtatcatgttattcgtcgtacaatcaatttaccgacctataccctggaagcagtgtatgaagccatctttggtaaacctaaagaaaaagtgtatgcggatgaaattgctaaagcttgggaaacgggcgaaggcttagaacgcgttgctaaatatagcatggaagatgccaaagctacctatgaactgggcaaagaatttttccctatggaagctcagctgagtcgtctggtgggtcagcctctgtgggatgtgagtcgtagtagtacgggcaatttagtggaatggtttctgctgcgcaaagcctatgaacgtaatgaattagcacctaacaaaccggatgaacgcgaatatgaacgccgcctgcgtgaatcttatgcaggcggttttgttaaagaaccggaaaaaggcctgtgggaaaatattgtgtctctggattttcgtgcactgtatccgagcatcatcattacacataatgtgtctccagataccctgaatcgcgaaggttgtcgtaattatgatgttgctccggaagtgggtcataaattttgcaaagattttccaggttttattccgagtctgctgaaacgcttactggatgaacgtcagaaaatcaaaaccaaaatgaaagcctcacaggatcctatcgaaaaaatcatgttagattatcgtcagcgtgccatcaaaattctggccaatagctattatggctattatggctatgctaaagctcgctggtattgcaaagaatgcgccgaatcagtgaccgcttggggtcgcgaatatatcgaatttgtgtggaaagaactggaagaaaaatttggctttaaagttctgtatatcgataccgatggcctgtatgcgaccattccgggtggtaaatctgaagaaattaagaagaaggccttagaatttgtggattatattaatgccaaactgccgggcctgctggaactggaatatgaaggcttttataaacgcggcttcttcgtgaccaagaaaaaatatgcactgatcgatgaagaaggtaaaatcattacacgcggcttagaaattgtgcgccgcgattggagcgaaattgccaaagaaacccaggcccgcgttctggaagccatcctgaaacatggtaatgtggaagaagcagttcgcattgttaaagaagtgacacagaaactgagcaaatatgaaatcccaccggaaaaactggccatctatgaacagattacacgtccactgcatgaatataaagccattggtccacatgttgcggttgccaaacgcttagccgctaaaggtgttaaaatcaaaccaggcatggttatcggctatattgttctgcgcggcgatggtccgatctctaatcgtgccatcttagcggaagaatatgatccacgcaaacataaatatgatgccgaatattatatcgaaaatcaggtgttaccagcagtgctgcgcattctggaaggctttggctatcgcaaagaagatttacgttggcagaaaaccaaacagacgggcctgacaagttggctgaatattaaaaaatcaggtacgggcggtggcggtgctacggttaaatttaaatataaaggcgaagaaaaagaagtggatattagtaaaatcaaaaaagtttggcgtgtgggcaaaatgatctctttcacttatgatgaaggcggcggcaaaaccggccgcggtgccgtgagcgaaaaagatgctcctaaagaactgttgcaaatgttagaaaaacagaaaaaaaattaa

SEQ ID NO: 433 - DNA, 2538 bp, Artificial Sequence
  Synthetic
atgatcttagatgcagattatatcacggaagaaggcaaaccagtgattcgcctgtttaaaaaagaaaatggcgaatttaaaatcgaacatgatcgcacctttcgcccgtatatctatgccctgctgaaagatgatagtaaaatcgaagaagttaagaaaatcacagcggaacgtcatggtaaaattgttcgcatcgttgatgcggaaaaagttgaaaagaaatttctgggtcgtcctattacagtttggcgtctgtattttgaacattttcaggatgttccgacgattcgcgaaaaaatccgcgaacatagcgccgttgtggacatatttgaatatgatattccgtttgccaaacgctatctgattgataaaggtttaatccctatggaaggcgatgaagaactgaaactgttagcgtttgacatcgaaaccctgtatcatgaaggtgaagaatttggcaaaggcccgatcatcatgatctcttatgcagatgaagaagaagctaaagtgatcacttggaagaagatcgatttaccgtatgttgaagttgtgtctagtgaacgcgaaatgatcaaacgctttctgaaaatcattcgcgaaaaagatccggatattatcattacctataatggtgatagctttgatttaccttatttagccaaacgtgccgaaaaactgggcatcaaactgacgatcggtcgtgatggtagcgaacctaaaatgcagcgcatcggcgatatgacagcagttgaagttaaaggtcgcatccattttgatctgtatcatgttattcgtcgtacaatcaatttaccgacctataccctggaagcagtgtatgaagccatctttggtaaacctaaagaaaaagtgtatgcggatgaaattgctaaagcttgggaaacgggcgaaggcttagaacgcgttgctaaatatagcatggaagatgccaaagctacctatgaactgggcaaagaatttttccctatggaagctcagctgagtcgtctggtgggtcagcctctgtgggatgtgagtcgtagtagtacgggcaatttagtggaatggtttctgctgcgcaaagcctatgaacgtaatgaattagcacctaacaaaccggatgaacgcgaatatgaacgccgcctgcgtgaatcttatgcaggcggttttgttaaagaaccggaaaaaggcctgtgggaaaatattgtgtctctggattttcgtgcactgtatccgagcatcatcattacacataatgtgtctccagataccctgaatcgcgaaggttgtcgtaattatgatgttgctccggaagtgggtcataaattttgcaaagattttccaggttttattccgagtctgctgaaacgcttactggatgaacgtcagaaaatcaaaaccaaaatgaaagcctcacaggatcctatcgaaaaaatcatgttagattatcgtcagcgtgccatcaaaattctggccaatagctattatggctattatggctatgctaaagctcgctggtattgcaaagaatgcgccgaatcagtgaccgcttggggtcgcgaatatatcgaatttgtgtggaaagaactggaagaaaaatttggctttaaagttctgtatatcgataccgatggcctgtatgcgaccattccgggtggtaaatctgaagaaattaagaagaaggccttagaatttgtggattatattaatgccaaactgccgggcctgctggaactggaatatgaaggcttttataaacgcggcttcttcgtgaccaagaaaaaatatgcactgatcgatgaagaaggtaaaatcattacacgcggcttagaaattgtgcgccgcgattggagcgaaattgccaaagaaacccaggcccgcgttctggaagccatcctgaaacatggtaatgtggaagaagcagttcgcattgttaaagaagtgacacagaaactgagcaaatatgaaatcccaccggaaaaactggccatctatgaacagattacacgtccactgcatgaatataaagccattggtccacatgttgcggttgccaaacgcttagccgctaaaggtgttaaaatcaaaccaggcatggttatcggctatattgttctgcgcggcgatggtccgatctctaatcgtgccatcttagcggaagaatatgatccacgcaaacataaatatgatgccgaatattatatcgaaaatcaggtgttaccagcagtgctgcgcattctggaaggctttggctatcgcaaagaagatttacgttggcagaaaaccaaacagacgggcctgacaagttggctgaatattaaaaaatcaggtacgggcggtggcggtgctacggttaaatttaaatataaaggcgaagaaaaagaagtggatattagtaaaatcaaaaaagtttggcgtgtgggcaaaatgatctctttcacttatgatgaaggcggcggcaaaaccggccgcggtgccgtgagcgaaaaagatgctcctaaagaactgttgcaaatgttagaaaaacagaaaaaaaattaa

SEQ ID NO: 434 - DNA, 2538 bp, Artificial Sequence
  Synthetic
atgatcttagatgcagattatatcacggaagaaggcaaaccagtgattcgcctgtttaaaaaagaaaatggcgaatttaaaatcgaacatgatcgcacctttcgcccgtatatctatgccctgctgaaagatgatagtaaaatcgaagaagttaagaaaatcacagcggaacgtcatggtaaaattgttcgcatcgttgatgcggaaaaagttgaaaagaaatttctgggtcgtcctattacagtttggcgtctgtattttgaacatcctcaggatgaaccgacgattcgcgaaaaaatccgcgaacatagcgccgttgtggacatatttgaatatgatattccgtttgccaaacgctatctgattgataaaggtttaatccctatggaaggcgatgaagaactgaaactgttagcgtttgacatcgaaaccctgtatcatgaaggtgaagaatttggcaaaggcccgatcatcatgatctcttatgcagatgaagaagaagctaaagtgatcacttggaagaagatcgatttaccgtatgttgaagttgtgtctagtgaacgcgaaatgatcaaacgctttctgaaaatcattcgcgaaaaagatccggatattatcattacctataatggtgatagctttgatttaccttatttagccaaacgtgccgaaaaactgggcatcaaactgacgatcggtcgtgatggtagcgaacctaaaatgcagcgcatcggcgatatgacagcagttgaagttaaaggtcgcatccattttgatctgtatcatgttattcgtcgtacaatcaatttaccgacctataccctggaagcagtgtatgaagccatctttggtaaacctaaagaaaaagtgtatgcggatgaaattgctaaagcttgggaaacgggcgaaggcttagaacgcgttgctaaatatagcatggaagatgccaaagctacctatgaactgggcaaagaatttttccctatggaagctcagctgagtcgtctggtgggtcagcctctgtgggatgtgagtcgtagtagtacgggcaatttagtggaatggtttctgctgcgcaaagcctatgaacgtaatgaattagcacctaacaaaccggatgaacgcgaatatgaacgccgcctgcgtgaatcttatgcaggcggttttgttaaagaaccggaaaaaggcctgtgggaaaatattgtgtctctggattttcgtgcactgtatccgagcatcatcattacacataatgtgtctccagataccctgaatcgcgaaggttgtcgtaattatgatgttgctccggaagtgggtcataaattttgcaaagattttccaggttttattccgagtctgctgaaacgcttactggatgaacgtcagaaaatcaaaaccaaaatgaaagcctcacaggatcctatcgaaaaaatcatgttagattatcgtcagcgtgccatcaaaattctggccaatagctattatggctattatggctatgctaaagctcgctggtattgcaaagaatgcgccgaatcagtgaccgcttggggtcgcgaatatatcgaatttgtgtggaaagaactggaagaaaaatttggctttaaagttctgtatatcgataccgatggcctgtatgcgaccattccgggtggtaaatctgaagaaattaagaagaaggccttagaatttgtggattatattaatgccaaactgccgggcctgctggaactggaatatgaaggcttttataaacgcggcttcttcgtgaccaagaaaaaatatgcactgatcgatgaagaaggtaaaatcattacacgcggcttagaaattgtgcgccgcgattggagcgaaattgccaaagaaacccaggcccgcgttctggaagccatcctgaaacatggtaatgtggaagaagcagttcgcattgttaaagaagtgacacagaaactgagcaaatatgaaatcccaccggaaaaactggccatctatgaacagattacacgtccactgcatgaatataaagccattggtccacatgttgcggttgccaaacgcttagccgctaaaggtgttaaaatcaaaccaggcatggttatcggctatattgttctgcgcggcgatggtccgatctctaatcgtgccatcttagcggaagaatatgatccacgcaaacataaatatgatgccgaatattatatcgaaaatcaggtgttaccagcagtgctgcgcattctggaaggctttggctatcgcaaagaagatttacgttggcagaaaaccaaacagacgggcctgacaagttggctgaatattaaaaaatcaggtacgggcggtggcggtgctacggttaaatttaaatataaaggcgaagaaaaagaagtggatattagtaaaatcaaaaaagtttggcgtgtgggcaaaatgatctctttcacttatgatgaaggcggcggcaaaaccggccgcggtgccgtgagcgaaaaagatgctcctaaagaactgttgcaaatgttagaaaaacagaaaaaaaattaa

SEQ ID NO: 435 - DNA, 2538 bp, Artificial Sequence
  Synthetic
atgatcttagatgcagattatatcacggaagaaggcaaaccagtgattcgcctgtttaaaaaagaaaatggcgaatttaaaatcgaacatgatcgcacctttcgcccgtatatctatgccctgctgaaagatgatagtaaaatcgaagaagttaagaaaatcacagcggaacgtcatggtaaaattgttcgcatcgttgatgcggaaaaagttgaaaagaaatttctgggtcgtcctattacagtttggcgtctgtattttgaacatcctcaggatcagccgacgattcgcgaaaaaatccgcgaacatagcgccgttgtggacatatttgaatatgatattccgtttgccaaacgctatctgattgataaaggtttaatccctatggaaggcgatgaagaactgaaactgttagcgtttgacatcgaaaccctgtatcatgaaggtgaagaatttggcaaaggcccgatcatcatgatctcttatgcagatgaagaagaagctaaagtgatcacttggaagaagatcgatttaccgtatgttgaagttgtgtctagtgaacgcgaaatgatcaaacgctttctgaaaatcattcgcgaaaaagatccggatattatcattacctataatggtgatagctttgatttaccttatttagccaaacgtgccgaaaaactgggcatcaaactgacgatcggtcgtgatggtagcgaacctaaaatgcagcgcatcggcgatatgacagcagttgaagttaaaggtcgcatccattttgatctgtatcatgttattcgtcgtacaatcaatttaccgacctataccctggaagcagtgtatgaagccatctttggtaaacctaaagaaaaagtgtatgcggatgaaattgctaaagcttgggaaacgggcgaaggcttagaacgcgttgctaaatatagcatggaagatgccaaagctacctatgaactgggcaaagaatttttccctatggaagctcagctgagtcgtctggtgggtcagcctctgtgggatgtgagtcgtagtagtacgggcaatttagtggaatggtttctgctgcgcaaagcctatgaacgtaatgaattagcacctaacaaaccggatgaacgcgaatatgaacgccgcctgcgtgaatcttatgcaggcggttttgttaaagaaccggaaaaaggcctgtgggaaaatattgtgtctctggattttcgtgcactgtatccgagcatcatcattacacataatgtgtctccagataccctgaatcgcgaaggttgtcgtaattatgatgttgctccggaagtgggtcataaattttgcaaagattttccaggttttattccgagtctgctgaaacgcttactggatgaacgtcagaaaatcaaaaccaaaatgaaagcctcacaggatcctatcgaaaaaatcatgttagattatcgtcagcgtgccatcaaaattctggccaatagctattatggctattatggctatgctaaagctcgctggtattgcaaagaatgcgccgaatcagtgaccgcttggggtcgcgaatatatcgaatttgtgtggaaagaactggaagaaaaatttggctttaaagttctgtatatcgataccgatggcctgtatgcgaccattccgggtggtaaatctgaagaaattaagaagaaggccttagaatttgtggattatattaatgccaaactgccgggcctgctggaactggaatatgaaggcttttataaacgcggcttcttcgtgaccaagaaaaaatatgcactgatcgatgaagaaggtaaaatcattacacgcggcttagaaattgtgcgccgcgattggagcgaaattgccaaagaaacccaggcccgcgttctggaagccatcctgaaacatggtaatgtggaagaagcagttcgcattgttaaagaagtgacacagaaactgagcaaatatgaaatcccaccggaaaaactggccatctatgaacagattacacgtccactgcatgaatataaagccattggtccacatgttgcggttgccaaacgcttagccgctaaaggtgttaaaatcaaaccaggcatggttatcggctatattgttctgcgcggcgatggtccgatctctaatcgtgccatcttagcggaagaatatgatccacgcaaacataaatatgatgccgaatattatatcgaaaatcaggtgttaccagcagtgctgcgcattctggaaggctttggctatcgcaaagaagatttacgttggcagaaaaccaaacagacgggcctgacaagttggctgaatattaaaaaatcaggtacgggcggtggcggtgctacggttaaatttaaatataaaggcgaagaaaaagaagtggatattagtaaaatcaaaaaagtttggcgtgtgggcaaaatgatctctttcacttatgatgaaggcggcggcaaaaccggccgcggtgccgtgagcgaaaaagatgctcctaaagaactgttgcaaatgttagaaaaacagaaaaaaaattaa

SEQ ID NO: 436 - DNA, 2328 bp, Artificial Sequence
  Synthetic
atgatcctggatgcggactacattaccgaagacggcaaaccggtcgtgcgtatcttcaaaaaagaaaacggcgaattcaaaatcgaatatgatcgcaactttgaaccgtatatctacgctctgctgaaagatgactccgcgatcgaagaagtgaagaaaattaccgccgaacgccatggcaaagtggttcgtgtcaaacgcgcagaaaaagtgaagaaaaaatttctgggtcgtccgattgaagtttggaaactgtatttcgaacatccgcaggatgtcccggctatccgtgacaaaattcgcgaacacccggcggtcgtggatatctatgaatacgacattccgtttgctaaacgttatctgatcgataaaggcctgattccgatggaaggtgacgaagaactgaaaatgctggcctttgatattgaaaccctgtatcacgaaggcgaagaattcggcaaaggtccgatcctgatgatttcatacgcagacgaagaagaagcgcgtgtgatcacctggaagaaaattgatctgccgtatgttgaagttgtctcgacggaacgtgaaatgatcaaacgttttctgcgcgtcattaaagaaaaagatccggacgtgctgatcacctataacggcgataattttgacttcgcatacctgaaaaaacgctgcgaaaaactgggtatcaaattcacgctgggccgtgatggtagcgaaccgaaaattcaacgtatgggcgatcgctttgcggtggacgttaaaggtcgcattcatttcgatctgtatccggttatccgtcgcaccattaatctgccgacctatacgctggaagcggtttacgaagccatctttggcaaaccgaaagaaaaagtgtacgccgaagaaattgcagaagcttgggaaaccggcgaaggtctggaacgtgtggcccgctattcaatggaagatgcaaaagttacgtacgaactgggtcgtgaatttttcccgatggaagcgcagctgagccgcctgattggccaaccgctgtgggatgtttctcgtagctctaccggtaacctggtcgaatggttcctgctgcgtaaagcgtatgaacgcaacgaaattgcgccgaataaaccggatgaacgtgaactggcacgtcgccgtggcggttatgcaggcggttacgttaaagaaccggaacgcggcctgtgggataatatcgtctatctggactttatgagtctgtacccgtccattatcattacccataacgttagtccggacacgttcaatcgtgaaggctgcaaagaatatgataccgccccgcaggttggtcacaagttttgtaaagacgtccaaggcttcattccgagtctgctgggtgccctgctggatgaacgccagaaaatcaagaaacgtatgaaggcatccattgatccgctggaaaagaaactgctggactatcgccaaaaggcgatcaaaattctggccaactcatattacggctattacggttatgcacgcgctcgttggtactgcaaagaatgtgcagaatcggtgaccgcttggggccgtgattatattgaaaccacgatccacgaaattgaagaacgctttggtttcaaagttctgtacgctgataccgacggctttttcgcgacgatcccgggtgcggatgccgaaaccgtgaagaaaaaggctaaggaattcctgaagtacatcaacgcgaaactgccgggcctgctggaactggaatatgaaggcttctacgtccgtggctttttcgtgaccaaaaagaaatacgcggttatcgacgaagaaggcaaaattaccacgcgcggtctggaaatcgtgcgccgtgattggagtgaaattgccaaagaaacccaggcacgcgtcctggaagcaatcctgaaagatggtgacgtggaagaagccgtccgtattgtgaaagaagttacggaaaaactgtccaaatatgaagttccgccggaaaaactggtcatccatgaacaaattacccgcgaactgaaagattacaaagcgacgggcccgcacgtcgcaatcgctaaacgtctggcggcgcgtggcgtgaaaattcgtccgggtaccgtgatctcatatattgttctgaaaggctcgggtcgtatcggtgaccgcgctattccgtttgatgaattcgacccgaaaaaacacaaatacgatgcggaatactacatcgaaaaccaggttctgccggccgtcgaacgtattctgcgcgcatttggctaccgtaaagaagatctgcgttatcaaaaaaccaaacaagtgggtctgggtgcgtggctgaaaccgaaaggtaaaaaataa

SEQ ID NO: 437 - DNA, 2325 bp, Artificial Sequence
  Synthetic
atgatcctggatgcggactacattaccgaagacggcaaaccggtcgtgcgtatcttcaaaaaagaaaacggcgaattcaaaatcgaatatgatcgcaactttgaaccgtatatctacgctctgctgaaagatgactccgcgatcgaagaagtgaagaaaattaccgccgaacgccatggcaaagtggttcgtgtcaaacgcgcagaaaaagtgaagaaaaaatttctgggtcgtccgattgaagtttggaaactgtatttcgaacatccgcaggatgtcccggctatccgtgacaaaattcgcgaacacccggcggtcgtggatatctatgaatacgacattccgtttgctaaacgttatctgatcgataaaggcctgattccgatggaaggtgacgaagaactgaaaatgctggcctttgatattgaaaccctgtatcacgaaggcgaagaattcggcaaaggtccgatcctgatgatttcatacgcagacgaagaagaagcgcgtgtgatcacctggaagaaaattgatctgccgtatgttgaagttgtctcgacggaacgtgaaatgatcaaacgttttctgcgcgtcattaaagaaaaagatccggacgtgctgatcacctataacggcgataattttgacttcgcatacctgaaaaaacgctgcgaaaaactgggtatcaaattcacgctgggccgtgatggtagcgaaccgaaaattcaacgtatgggcgatcgctttgcggtggacgttaaaggtcgcattcatttcgatctgtatccggttatccgtcgcaccattaatctgccgacctatacgctggaagcggtttacgaagccatctttggcaaaccgaaagaaaaagtgtacgccgaagaaattgcagaagcttgggaaaccggcgaaggtctggaacgtgtggcccgctattcaatggaagatgcaaaagttacgtacgaactgggtcgtgaatttttcccgatggaagcgcagctgagccgcctgattggccaaccgctgtgggatgtttctcgtagctctaccggtaacctggtcgaatggttcctgctgcgtaaagcgtatgaacgcaacgaaattgcgccgaataaaccggatgaacgtgaactggcacgtcgccgtggcggttatgcaggcggttacgttaaagaaccggaacgcggcctgtgggataatatcgtctatctggactttatgagtctgtacccgtccattatcattacccataacgttagtccggacacgttcaatcgtgaaggctgcaaagaatatgataccgccccgcaggttggtcacaagttttgtaaagacgtccaaggcttcattccgagtctgctgggtgccctgctggatgaacgccagaaaatcaagaaacgtatgaaggcatccattgatccgctggaaaagaaactgctggactatcgccaaaaggcgatcaaaattctggccaactcatattacggctattacggttatgcacgcgctcgttggtactgcaaagaatgtgcagaatcggtgaccgcttggggccgtgattatattgaaaccacgatccacgaaattgaagaacgctttggtttcaaagttctgtacgctgataccgacggctttttcgcgacgatcccgggtgcggatgccgaaaccgtgaagaaaaaggctaaggaattcctgaagtacatcaacgcgaaactgccgggcctgctggaactggaatatgaaggcttctacgtccgtggctttttcgtgaccaaaaagaaatacgcggttatcgacgaagaaggcaaaattaccacgcgcggtctggaaatcgtgcgccgtgattggagtgaaattgccaaagaaacccaggcacgtgttctggaagcaattctgaaacatggtaacgtcgaagaagcggtcaaaatcgtgaaagaagttacggaaaaactgtctaactacgaaattccgccggaaaaactggccatctacgaacaaattacccgcccgctgcatgaatataaagcaatcggtccgcacgtcgcagtggcaaaacgtctggcagcacgcggcgttaaagtcaaaccgggtatggtcatcggctatattgtgctgcgtggtgatggcccgatcagcaaccgcgcaattctggctgaagaatacgatctgaaaaaacacaaatacgacgccgaatattacatcgaaaatcaggttctgccggctgtcctgcgtattctggaagcgtttggctatcgtaaagaagatctgcgctggcagaaaacccgtcaaacgggtctgacctcatggctgaatattaaaaaatcgtaa

SEQ ID NO: 438 - DNA, 2325 bp, Artificial Sequence
  Synthetic
atgatcctggatgcggactacattaccgaagacggcaaaccggtcgtgcgtatcttcaaaaaagaaaacggcgaattcaaaatcgaatatgatcgcaactttgaaccgtatatctacgctctgctgaaagatgactccgcgatcgaagaagtgaagaaaattaccgccgaacgccatggcaaagtggttcgtgtcaaacgcgcagaaaaagtgaagaaaaaatttctgggtcgtccgattgaagtttggaaactgtatttcgaacatccgcaggatgtcccggctatccgtgacaaaattcgcgaacacccggcggtcgtggatatctatgaatacgacattccgtttgctaaacgttatctgatcgataaaggcctgattccgatggaaggtgacgaagaactgaaaatgctggcctttgatattgaaaccctgtatcacgaaggcgaagaattcggcaaaggtccgatcctgatgatttcatacgcagacgaagaagaagcgcgtgtgatcacctggaagaaaattgatctgccgtatgttgaagttgtctcgacggaacgtgaaatgatcaaacgttttctgcgcgtcattaaagaaaaagatccggacgtgctgatcacctataacggcgataattttgacttcgcatacctgaaaaaacgctgcgaaaaactgggtatcaaattcacgctgggccgtgatggtagcgaaccgaaaattcaacgtatgggcgatcgctttgcggtggacgttaaaggtcgcattcatttcgatctgtatccggttatccgtcgcaccattaatctgccgacctatacgctggaagcggtttacgaagccatctttggcaaaccgaaagaaaaagtgtacgccgaagaaattgcagaagcttgggaaaccggcgaaggtctggaacgtgtggcccgctattcaatggaagatgcaaaagttacgtacgaactgggtcgtgaatttttcccgatggaagcgcagctgagccgcctgattggccaaccgctgtgggatgtttctcgtagctctaccggtaacctggtcgaatggttcctgctgcgtaaagcgtatgaacgcaacgaaattgcgccgaataaaccggatgaacgtgaactggcacgtcgccgtggcggttatgcaggcggttacgttaaagaaccggaacgcggcctgtgggataatatcgtctatctggactttatgagtctgtacccgtccattatcattacccataacgttagtccggacacgttcaatcgtgaaggctgcaaagaatatgataccgccccgcaggttggtcacaagttttgtaaagacgtccaaggcttcattccgagtctgctgggtgccctgctggatgaacgccagaaaatcaagaaacgtatgaaggcatccattgatccgctggaaaagaaactgctggactatcgccaaaaggcgatcaaaattctggccaactcatattacggctattacggttatgcacgcgctcgttggtactgcaaagaatgtgcagaatcggtgaccgcttggggccgtgattatattgaaaccacgatccacgaaattgaagaacgctttggtttcaaagttctgtacgctgataccgacggctttttcgcgacgatcccgggtgcggatgccgaaaccgtgaagaaaaaggctaaggaattcctgaagtacatcaacgcgaaactgccgggcctgctggaactggaatatgaaggcttctacgtccgtggctttttcgtgaccaaaaagaaatacgcggttatcgacgaagaaggcaaaattaccacgcgcggtctggaaatcgtgcgccgtgattggagtgaaattgccaaagaaacccaggcaaaagttctggaagcaatcctgaaacatggtaatgtcgaagaagcagtgaaaattgtcaaggaagtgacggaaaaactgtcgaagtatgaaatcccgccggaaaaactggtgatctacgaacaaattacccgcccgctgcatgaatataaagcgattggcccgcacgtggcagttgctaaacgtctggcagcccgcggtgtcaaagtgcgtccgggcatggtgatcggttatattgttctgcgtggcgatggtccgatcagtaaacgcgcgattctggccgaagaatttgatccgcgcaaacacaagtacgacgccgaatattacatcgaaaaccaggtgctgccggctgttctgcgtattctggaagcgttcggctatcgtaaagaagatctgcgctggcagaaaaccaagcaaacgggtctgaccgcatggctgaatgtgaaaaagaaataa

SEQ ID NO: 439 - DNA, 2328 bp, Artificial Sequence
  Synthetic
atgatcctggatgcggactacattaccgaagacggcaaaccggtcgtgcgtatcttcaaaaaagaaaacggcgaattcaaaatcgaatatgatcgcaactttgaaccgtatatctacgctctgctgaaagatgactccgcgatcgaagaagtgaagaaaattaccgccgaacgccatggcaaagtggttcgtgtcaaacgcgcagaaaaagtgaagaaaaaatttctgggtcgtccgattgaagtttggaaactgtatttcgaacatccgcaggatgtcccggctatccgtgacaaaattcgcgaacacccggcggtcgtggatatctatgaatacgacattccgtttgctaaacgttatctgatcgataaaggcctgattccgatggaaggtgacgaagaactgaaaatgctggcctttgatattgaaaccctgtatcacgaaggcgaagaattcggcaaaggtccgatcctgatgatttcatacgcagacgaagaagaagcgcgtgtgatcacctggaagaaaattgatctgccgtatgttgaagttgtctcgacggaacgtgaaatgatcaaacgttttctgcgcgtcattaaagaaaaagatccggacgtgctgatcacctataacggcgataattttgacttcgcatacctgaaaaaacgctgcgaaaaactgggtatcaaattcacgctgggccgtgatggtagcgaaccgaaaattcaacgtatgggcgatcgctttgcggtggacgttaaaggtcgcattcatttcgatctgtatccggttatccgtcgcaccattaatctgccgacctatacgctggaagcggtttacgaagccatctttggcaaaccgaaagaaaaagtgtacgccgaagaaattgcagaagcttgggaaaccggcgaaggtctggaacgtgtggcccgctattcaatggaagatgcaaaagttacgtacgaactgggtcgtgaatttttcccgatggaagcgcagctgagccgcctgattggccaaccgctgtgggatgtttctcgtagctctaccggtaacctggtcgaatggttcctgctgcgtaaagcgtatgaacgcaacgaactggctccgaataagccggatgaacgcgaactggttcgtcgccgtaacagctataccggcggttacgtcaaagaaccggaacgcggcctgtgggataatatcgtttatctggactttcgtagtctgtacccgtccattatcattacccataacgtgtcaccggacacgctgaatcgtgaaggctgcaaagaatatgatgaagccccgcaagtgggtcacaagttctgtaaagactttccgggcttcattccgtcgctgctgggtaacctgctggatgaacgccagaaaatcaagaaacgtatgaaggcaaccattgatccgctggaaaagaaactgctggactatcgtcaacgcgctatcaaaattctggcgaattcttattacggctattacgcgtatgcgcgtgcgcgctggtactgcaaagaatgtgccgaaagtgtgaccgcatggggccgcgaatatattgaaatgtccatccgtgaaatcgaagaaaagtacggtttcaaggttctgtacgcggataccgacggtttccacgcaacgatcccgggtgccgatgcagaaaccgtgaagaaaaaggcgatggaattcctgaagtacatcaacgctaagctgccgggtgcgctggaactggaatatgaaggcttctacaaacgtggctttttcgtgacgaaaaagaaatacgccgttatcgacgaagaaggcaaaattaccacgcgcggtctggaaatcgtgcgccgtgattggagtgaaattgccaaagaaacccaggcacgcgttctggaagcaatcctgcgtcatggtgacgtcgaagaagccgttcgcattgtcaaagatgtgacggaaaagctgtcgaaatatgaagtcccgccggaaaaactggtgatccatgaacaaattacccgtgaactgaaggattacaaagcgacgggcccgcacgttgcaattgctaaacgcctggcagcccgtggcatcaagattcgtccgggtaccgttatcagctatattgtcctgaaaggctctggtcgcatcggtgatcgtgctattccgtttgatgaattcgacccgacgaaacaccgttacgatgccgaatattacatcgaaaatcaggtgctgccggccgttgaacgcattctgaaagcatttggctataagaaagaagaactgcgctaccagaaaacccgtcaagtgggcctgggtgcgtggctgaagctgaaaggtaagaaataa

SEQ ID NO: 440 - DNA, 2322 bp, Artificial Sequence
  Synthetic
atgatcctggatgcggactacattaccgaagacggcaaaccggtcgtgcgtatcttcaaaaaagaaaacggcgaattcaaaatcgaatatgatcgcaactttgaaccgtatatctacgctctgctgaaagatgactccgcgatcgaagaagtgaagaaaattaccgccgaacgccatggcaaagtggttcgtgtcaaacgcgcagaaaaagtgaagaaaaaatttctgggtcgtccgattgaagtttggaaactgtatttcgaacatccgcaggatgtcccggctatccgtgacaaaattcgcgaacacccggcggtcgtggatatctatgaatacgacattccgtttgctaaacgttatctgatcgataaaggcctgattccgatggaaggtgacgaagaactgaaaatgctggcctttgatattgaaaccctgtatcacgaaggcgaagaattcggcaaaggtccgatcctgatgatttcatacgcagacgaagaagaagcgcgtgtgatcacctggaagaaaattgatctgccgtatgttgaagttgtctcgacggaacgtgaaatgatcaaacgttttctgcgcgtcattaaagaaaaagatccggacgtgctgatcacctataacggcgataattttgacttcgcatacctgaaaaaacgctgcgaaaaactgggtatcaaattcacgctgggccgtgatggtagcgaaccgaaaattcaacgtatgggcgatcgctttgcggtggacgttaaaggtcgcattcatttcgatctgtatccggttatccgtcgcaccattaatctgccgacctatacgctggaagcggtttacgaagccatctttggcaaaccgaaagaaaaagtgtacgccgaagaaattgcagaagcttgggaaaccggcgaaggtctggaacgtgtggcccgctattcaatggaagatgcaaaagttacgtacgaactgggtcgtgaatttttcccgatggaagcgcagctgagccgcctgattggccaaccgctgtgggatgtttctcgtagctctaccggtaacctggtcgaatggttcctgctgcgtaaagcgtatgaacgcaacgaactggctccgaataagccggatgaacgcgaactggttcgtcgccgtaacagctataccggcggttacgtcaaagaaccggaacgcggcctgtgggataatatcgtttatctggactttcgtagtctgtacccgtccattatcattacccataacgtgtcaccggacacgctgaatcgtgaaggctgcaaagaatatgatgaagccccgcaagtgggtcacaagttctgtaaagactttccgggcttcattccgtcgctgctgggtaacctgctggatgaacgccagaaaatcaagaaacgtatgaaggcaaccattgatccgctggaaaagaaactgctggactatcgtcaacgcgctatcaaaattctggcgaattcttattacggctattacgcgtatgcgcgtgcgcgctggtactgcaaagaatgtgccgaaagtgtgaccgcatggggccgcgaatatattgaaatgtccatccgtgaaatcgaagaaaagtacggtttcaaggttctgtacgcggataccgacggtttccacgcaacgatcccgggtgccgatgcagaaaccgtgaagaaaaaggcgatggaattcctgaagtacatcaacgctaagctgccgggtgcgctggaactggaatatgaaggcttctacaaacgtggctttttcgtgacgaaaaagaaatacgccgttatcgacgaagaaggcaaaattaccacgcgcggtctggaaatcgtgcgccgtgattggagtgaaattgccaaagaaacccaggcacgtgtcctggaagcaatcctgaaacatggtgatgtggaagaagcggttcgcattgtcaaagaagtgacggaaaagctgtcgaaatatgaagttccgccggaaaaactggtcatccatgaacaaattacccgcgatctgcgtgactacaaagccacgggtccgcacgtggcagttgcaaaacgtctggcagcccgtggcgtgaagattcgtccgggtaccgtgatcagttatattgttctgaaaggctccggtcgcatcggtgaccgtgctattccgtttgatgaattcgacccgacgaaacaccgttacgatgccgaatattacatcgaaaatcaggtcctgccggccgtggaacgcattctgaaagcatttggttatcgcaaggaagatctgcgttaccagaagaccaaacaagtcggcctgggtgcgtggctgaaagtgaaaaagtaa

SEQ ID NO: 441 - DNA, 2328 bp, Artificial Sequence
  Synthetic
atgatcctggatgcggactacattaccgaagacggcaaaccggtcgtgcgtatcttcaaaaaagaaaacggcgaattcaaaatcgaatatgatcgcaactttgaaccgtatatctacgctctgctgaaagatgactccgcgatcgaagaagtgaagaaaattaccgccgaacgccatggcaaagtggttcgtgtcaaacgcgcagaaaaagtgaagaaaaaatttctgggtcgtccgattgaagtttggaaactgtatttcgaacatccgcaggatgtcccggctatccgtgacaaaattcgcgaacacccggcggtcgtggatatctatgaatacgacattccgtttgctaaacgttatctgatcgataaaggcctgattccgatggaaggtgacgaagaactgaaaatgctggcctttgatattgaaaccctgtatcacgaaggcgaagaattcggcaaaggtccgatcctgatgatttcatacgcagacgaagaagaagcgcgtgtgatcacctggaagaaaattgatctgccgtatgttgaagttgtctcgacggaacgtgaaatgatcaaacgttttctgcgcgtcattaaagaaaaagatccggacgtgctgatcacctataacggcgataattttgacttcgcatacctgaaaaaacgctgcgaaaaactgggtatcaaattcacgctgggccgtgatggtagcgaaccgaaaattcaacgtatgggcgatcgctttgcggtggacgttaaaggtcgcattcatttcgatctgtatccggttatccgtcgcaccattaatctgccgacctatacgctggaagcggtttacgaagccatctttggcaaaccgaaagaaaaagtgtacgccgaagaaattgcagaagcttgggaaaccggcgaaggtctggaacgtgtggcccgctattcaatggaagatgcaaaagttacgtacgaactgggtcgtgaatttttcccgatggaagcgcagctgagccgcctgattggccaaccgctgtgggatgtttctcgtagctctaccggtaacctggtcgaatggttcctgctgcgtaaagcgtatgaacgcaacgaactggctccgaataagccggatgaacgcgaactggttcgtcgccgtaacagctataccggcggttacgtcaaagaaccggaacgcggcctgtgggataatatcgtttatctggactttcgtagtctgtacccgtccattatcattacccataacgtgtcaccggacacgctgaatcgtgaaggctgcaaagaatatgatgaagccccgcaagtgggtcacaagttctgtaaagactttccgggcttcattccgtcgctgctgggtaacctgctggatgaacgccagaaaatcaagaaacgtatgaaggcaaccattgatccgctggaaaagaaactgctggactatcgtcaacgcgctatcaaaattctggcgaattcttattacggctattacgcgtatgcgcgtgcgcgctggtactgcaaagaatgtgccgaaagtgtgaccgcatggggccgcgaatatattgaaatgtccatccgtgaaatcgaagaaaagtacggtttcaaggttctgtacgcggataccgacggtttccacgcaacgatcccgggtgccgatgcagaaaccgtgaagaaaaaggcgatggaattcctgaagtacatcaacgctaagctgccgggtgcgctggaactggaatatgaaggcttctacaaacgtggctttttcgtgacgaaaaagaaatacgccgttatcgacgaagaaggcaaaattaccacgcgcggtctggaaatcgtgcgccgtgattggagtgaaattgccaaagaaacccaggcacgtgtgctggaagctctgctgaaagatggcaatgttgaagaagcggtttccattgtcaaagaagtgacggaaaagctgggtaaatatgaagtcccgccggaaaaactggtgatccatgaacaaattacccgcgaactgaaggattacaaagcgacgggcccgcacgttgctatcgcgaaacgtctggcagcgcgtggcgtgaagattcgtccgggtaccgttatcagctatattgtcctgaaaggctctggtcgtatcggtgaccgcgcgattccgtttgatgaattcgacccgacgaaacatcgctacgatgcagaatattacatcgaaaaccaggttctgccggctgtcgaacgtattctgaaagcgtttggctatcgtgccgaagatctgcgctaccagaaaacccgtcaagtgggcctgggtgtttggctgcaaccgaaaggtaagaaataa

SEQ ID NO: 442 - DNA, 2325 bp, Artificial Sequence
  Synthetic
atgatcctggatgcggactacattaccgaagacggcaaaccggtcgtgcgtatcttcaaaaaagaaaacggcgaattcaaaatcgaatatgatcgcaactttgaaccgtatatctacgctctgctgaaagatgactccgcgatcgaagaagtgaagaaaattaccgccgaacgccatggcaaagtggttcgtgtcaaacgcgcagaaaaagtgaagaaaaaatttctgggtcgtccgattgaagtttggaaactgtatttcgaacatccgcaggatgtcccggctatccgtgacaaaattcgcgaacacccggcggtcgtggatatctatgaatacgacattccgtttgctaaacgttatctgatcgataaaggcctgattccgatggaaggtgacgaagaactgaaaatgctggcctttgatattgaaaccctgtatcacgaaggcgaagaattcggcaaaggtccgatcctgatgatttcatacgcagacgaagaagaagcgcgtgtgatcacctggaagaaaattgatctgccgtatgttgaagttgtctcgacggaacgtgaaatgatcaaacgttttctgcgcgtcattaaagaaaaagatccggacgtgctgatcacctataacggcgataattttgacttcgcatacctgaaaaaacgctgcgaaaaactgggtatcaaattcacgctgggccgtgatggtagcgaaccgaaaattcaacgtatgggcgatcgctttgcggtggacgttaaaggtcgcattcatttcgatctgtatccggttatccgtcgcaccattaatctgccgacctatacgctggaagcggtttacgaagccatctttggcaaaccgaaagaaaaagtgtacgccgaagaaattgcagaagcttgggaaaccggcgaaggtctggaacgtgtggcccgctattcaatggaagatgcaaaagttacgtacgaactgggtcgtgaatttttcccgatggaagcgcagctgagccgcctgattggccaaccgctgtgggatgtttctcgtagctctaccggtaacctggtcgaatggttcctgctgcgtaaagcgtatgaacgcaacgaactggctccgaataagccggatgaacgcgaactggttcgtcgccgtaacagctataccggcggttacgtcaaagaaccggaacgcggcctgtgggataatatcgtttatctggactttcgtagtctgtacccgtccattatcattacccataacgtgtcaccggacacgctgaatcgtgaaggctgcaaagaatatgatgaagccccgcaagtgggtcacaagttctgtaaagactttccgggcttcattccgtcgctgctgggtaacctgctggatgaacgccagaaaatcaagaaacgtatgaaggcaaccattgatccgctggaaaagaaactgctggactatcgtcaacgcgctatcaaaattctggcgaattcttattacggctattacgcgtatgcgcgtgcgcgctggtactgcaaagaatgtgccgaaagtgtgaccgcatggggccgcgaatatattgaaatgtccatccgtgaaatcgaagaaaagtacggtttcaaggttctgtacgcggataccgacggtttccacgcaacgatcccgggtgccgatgcagaaaccgtgaagaaaaaggcgatggaattcctgaagtacatcaacgctaagctgccgggtgcgctggaactggaatatgaaggcttctacaaacgtggctttttcgtgacgaaaaagaaatacgccgttatcgacgaagaaggcaaaattaccacgcgcggtctggaaatcgtgcgccgtgattggagtgaaattgccaaagaaacccaggcaaaggttctggaagcaattctgaaacatggtaacgtcgaagaagcggtcaagatcgtgaaagaagttaccgaaaaactgtcgaattatgaaattccggtcgaaaagctggtgatctacgaacaaattacgcgcccgctgaacgaatataaagccattggcccgcacgtggcagttgctaaacgtctggcggccaagggtatcaagattaaaccgggcatggtgattggttatgttgtcctgcgcggcgatggtccgatcagcaaacgtgcgatcgccatcgaagaattcgatggcaaaaagcataagtacgacgcagaatactacatcgaaaatcaggttctgccggccgtcgaacgtatcctgaaagcattcggttataagcgtgaagatctgcgctggcagaagaccaaacaagtgggcctgggtgcgtggctgaaagttaaaaagtcttaa

SEQ ID NO: 443 - DNA, 2328 bp, Artificial Sequence
  Synthetic
atgatcctggatgcggactacattaccgaagacggcaaaccggtcgtgcgtatcttcaaaaaagaaaacggcgaattcaaaatcgaatatgatcgcaactttgaaccgtatatctacgctctgctgaaagatgactccgcgatcgaagaagtgaagaaaattaccgccgaacgccatggcaaagtggttcgtgtcaaacgcgcagaaaaagtgaagaaaaaatttctgggtcgtccgattgaagtttggaaactgtatttcgaacatccgcaggatgtcccggctatccgtgacaaaattcgcgaacacccggcggtcgtggatatctatgaatacgacattccgtttgctaaacgttatctgatcgataaaggcctgattccgatggaaggtgacgaagaactgaaaatgctggcctttgatattgaaaccctgtatcacgaaggcgaagaattcggcaaaggtccgatcctgatgatttcatacgcagacgaagaagaagcgcgtgtgatcacctggaagaaaattgatctgccgtatgttgaagttgtctcgacggaacgtgaaatgatcaaacgttttctgcgcgtcattaaagaaaaagatccggacgtgctgatcacctataacggcgataattttgacttcgcatacctgaaaaaacgctgcgaaaaactgggtatcaaattcacgctgggccgtgatggtagcgaaccgaaaattcaacgtatgggcgatcgctttgcggtggacgttaaaggtcgcattcatttcgatctgtatccggttatccgtcgcaccattaatctgccgacctatacgctggaagcggtttacgaagccatctttggcaaaccgaaagaaaaagtgtacgccgaagaaattgcagaagcttgggaaaccggcgaaggtctggaacgtgtggcccgctattcaatggaagatgcaaaagttacgtacgaactgggtcgtgaatttttcccgatggaagcgcagctgagccgcctgattggccaaccgctgtgggatgtttctcgtagctctaccggtaacctggtcgaatggttcctgctgcgtaaagcgtatgaacgcaacgaactggctccgaataagccggatgaacgcgaactggttcgtcgccgtaacagctataccggcggttacgtcaaagaaccggaacgcggcctgtgggataatatcgtttatctggactttcgtagtctgtacccgtccattatcattacccataacgtgtcaccggacacgctgaatcgtgaaggctgcaaagaatatgatgaagccccgcaagtgggtcacaagttctgtaaagactttccgggcttcattccgtcgctgctgggtaacctgctggatgaacgccagaaaatcaagaaacgtatgaaggcaaccattgatccgctggaaaagaaactgctggactatcgtcaacgcgctatcaaaattctggcgaattcttattacggctattacgcgtatgcgcgtgcgcgctggtactgcaaagaatgtgccgaaagtgtgaccgcatggggccgcgaatatattgaaatgtccatccgtgaaatcgaagaaaagtacggtttcaaggttctgtacgcggataccgacggtttccacgcaacgatcccgggtgccgatgcagaaaccgtgaagaaaaaggcgatggaattcctgaagtacatcaacgctaagctgccgggtgcgctggaactggaatatgaaggcttctacaaacgtggctttttcgtgacgaaaaagaaatacgccgttatcgacgaagaaggcaaaattaccacgcgcggtctggaaatcgtgcgccgtgattggagtgaaattgccaaagaaacccaggcacgtgttctggaagcactgctgaaagatggtaatgtcgaagaagcagtgagtattgttaaagaagtcacggaaaaactgtccaagtatgaagtcccgccggaaaaactggtgattcatgaacaaatcacccgcgaactgaaagattacaaggcgacgggcccgcacgtggcaattgctaaacgtctggcagcgcgtggcgttaagatccgtccgggtaccgttattagctatatcgtcctgaaaggctctggtcgtattggtgaccgcgccatcccgtttgatgaattcgacccggctaaacaccgctacgatgcggaatattacattgaaaatcaggtcctgccggctgtggaacgtatcctgaaagcgtttggctatcgtaaggaagatctgcgctaccagaaaacccgtcaagtgggcctgggtgcgtggctgaaaccgaagggtaaaaagtaa

SEQ ID NO: 444 - DNA, 2328 bp, Artificial Sequence
  Synthetic
atgatcctggatgcggactacattaccgaagacggcaaaccggtcgtgcgtatcttcaaaaaagaaaacggcgaattcaaaatcgaatatgatcgcaactttgaaccgtatatctacgctctgctgaaagatgactccgcgatcgaagaagtgaagaaaattaccgccgaacgccatggcaaagtggttcgtgtcaaacgcgcagaaaaagtgaagaaaaaatttctgggtcgtccgattgaagtttggaaactgtatttcgaacatccgcaggatgtcccggctatccgtgacaaaattcgcgaacacccggcggtcgtggatatctatgaatacgacattccgtttgctaaacgttatctgatcgataaaggcctgattccgatggaaggtgacgaagaactgaaaatgctggcctttgatattgaaaccctgtatcacgaaggcgaagaattcggcaaaggtccgatcctgatgatttcatacgcagacgaagaagaagcgcgtgtgatcacctggaagaaaattgatctgccgtatgttgaagttgtctcgacggaacgtgaaatgatcaaacgttttctgcgcgtcattaaagaaaaagatccggacgtgctgatcacctataacggcgataattttgacttcgcatacctgaaaaaacgctgcgaaaaactgggtatcaaattcacgctgggccgtgatggtagcgaaccgaaaattcaacgtatgggcgatcgctttgcggtggacgttaaaggtcgcattcatttcgatctgtatccggttatccgtcgcaccattaatctgccgacctatacgctggaagcggtttacgaagccatctttggcaaaccgaaagaaaaagtgtacgccgaagaaattgcagaagcttgggaaaccggcgaaggtctggaacgtgtggcccgctattcaatggaagatgcaaaagttacgtacgaactgggtcgtgaatttttcccgatggaagcgcagctgagccgcctgattggccaaccgctgtgggatgtttctcgtagctctaccggtaacctggtcgaatggttcctgctgcgtaaagcgtatgaacgcaacgaactggctccgaataagccggatgaacgcgaactggttcgtcgccgtaacagctataccggcggttacgtcaaagaaccggaacgcggcctgtgggataatatcgtttatctggactttcgtagtctgtacccgtccattatcattacccataacgtgtcaccggacacgctgaatcgtgaaggctgcaaagaatatgatgaagccccgcaagtgggtcacaagttctgtaaagactttccgggcttcattccgtcgctgctgggtaacctgctggatgaacgccagaaaatcaagaaacgtatgaaggcaaccattgatccgctggaaaagaaactgctggactatcgtcaacgcgctatcaaaattctggcgaattcttattacggctattacgcgtatgcgcgtgcgcgctggtactgcaaagaatgtgccgaaagtgtgaccgcatggggccgcgaatatattgaaatgtccatccgtgaaatcgaagaaaagtacggtttcaaggttctgtacgcggataccgacggtttccacgcaacgatcccgggtgccgatgcagaaaccgtgaagaaaaaggcgatggaattcctgaagtacatcaacgctaagctgccgggtgcgctggaactggaatatgaaggcttctacaaacgtggctttttcgtgacgaaaaagaaatacgccgttatcgacgaagaaggcaaaattaccacgcgcggtctggaaatcgtgcgccgtgattggagtgaaattgccaaagaaacccaggcacgcgtcctggaagcaatcctgaaagatggtgacgtggaagaagccgtccgtattgtgaaagaagttacggaaaaactgtccaaatatgaagttccgccggaaaaactggtcatccatgaacaaattacccgcgaactgaaagattacaaagcgacgggcccgcacgtcgcaatcgctaaacgtctggcggcgcgtggcgtgaaaattcgtccgggtaccgtgatctcatatattgttctgaaaggctcgggtcgtatcggtgaccgcgctattccgtttgatgaattcgacccgaaaaaacacaaatacgatgcggaatactacatcgaaaaccaggttctgccggccgtcgaacgtattctgcgcgcatttggctaccgtaaagaagatctgcgttatcaaaaaaccaaacaagtgggtctgggtgcgtggctgaaaccgaaaggtaaaaaataa

SEQ ID NO: 445 - DNA, 2325 bp, Artificial Sequence
  Synthetic
atgatcctggatgcggactacattaccgaagacggcaaaccggtcgtgcgtatcttcaaaaaagaaaacggcgaattcaaaatcgaatatgatcgcaactttgaaccgtatatctacgctctgctgaaagatgactccgcgatcgaagaagtgaagaaaattaccgccgaacgccatggcaaagtggttcgtgtcaaacgcgcagaaaaagtgaagaaaaaatttctgggtcgtccgattgaagtttggaaactgtatttcgaacatccgcaggatgtcccggctatccgtgacaaaattcgcgaacacccggcggtcgtggatatctatgaatacgacattccgtttgctaaacgttatctgatcgataaaggcctgattccgatggaaggtgacgaagaactgaaaatgctggcctttgatattgaaaccctgtatcacgaaggcgaagaattcggcaaaggtccgatcctgatgatttcatacgcagacgaagaagaagcgcgtgtgatcacctggaagaaaattgatctgccgtatgttgaagttgtctcgacggaacgtgaaatgatcaaacgttttctgcgcgtcattaaagaaaaagatccggacgtgctgatcacctataacggcgataattttgacttcgcatacctgaaaaaacgctgcgaaaaactgggtatcaaattcacgctgggccgtgatggtagcgaaccgaaaattcaacgtatgggcgatcgctttgcggtggacgttaaaggtcgcattcatttcgatctgtatccggttatccgtcgcaccattaatctgccgacctatacgctggaagcggtttacgaagccatctttggcaaaccgaaagaaaaagtgtacgccgaagaaattgcagaagcttgggaaaccggcgaaggtctggaacgtgtggcccgctattcaatggaagatgcaaaagttacgtacgaactgggtcgtgaatttttcccgatggaagcgcagctgagccgcctgattggccaaccgctgtgggatgtttctcgtagctctaccggtaacctggtcgaatggttcctgctgcgtaaagcgtatgaacgcaacgaactggctccgaataagccggatgaacgcgaactggttcgtcgccgtaacagctataccggcggttacgtcaaagaaccggaacgcggcctgtgggataatatcgtttatctggactttcgtagtctgtacccgtccattatcattacccataacgtgtcaccggacacgctgaatcgtgaaggctgcaaagaatatgatgaagccccgcaagtgggtcacaagttctgtaaagactttccgggcttcattccgtcgctgctgggtaacctgctggatgaacgccagaaaatcaagaaacgtatgaaggcaaccattgatccgctggaaaagaaactgctggactatcgtcaacgcgctatcaaaattctggcgaattcttattacggctattacgcgtatgcgcgtgcgcgctggtactgcaaagaatgtgccgaaagtgtgaccgcatggggccgcgaatatattgaaatgtccatccgtgaaatcgaagaaaagtacggtttcaaggttctgtacgcggataccgacggtttccacgcaacgatcccgggtgccgatgcagaaaccgtgaagaaaaaggcgatggaattcctgaagtacatcaacgctaagctgccgggtgcgctggaactggaatatgaaggcttctacaaacgtggctttttcgtgacgaaaaagaaatacgccgttatcgacgaagaaggcaaaattaccacgcgcggtctggaaatcgtgcgccgtgattggagtgaaattgccaaagaaacccaggcacgtgttctggaagcaattctgaaacatggtaacgtcgaagaagcggtcaaaatcgtgaaagaagttacggaaaaactgtctaactacgaaattccgccggaaaaactggccatctacgaacaaattacccgcccgctgcatgaatataaagcaatcggtccgcacgtcgcagtggcaaaacgtctggcagcacgcggcgttaaagtcaaaccgggtatggtcatcggctatattgtgctgcgtggtgatggcccgatcagcaaccgcgcaattctggctgaagaatacgatctgaaaaaacacaaatacgacgccgaatattacatcgaaaatcaggttctgccggctgtcctgcgtattctggaagcgtttggctatcgtaaagaagatctgcgctggcagaaaacccgtcaaacgggtctgacctcatggctgaatattaaaaaatcgtaa

SEQ ID NO: 446 - DNA, 2325 bp, Artificial Sequence
  Synthetic
atgatcctggatgcggactacattaccgaagacggcaaaccggtcgtgcgtatcttcaaaaaagaaaacggcgaattcaaaatcgaatatgatcgcaactttgaaccgtatatctacgctctgctgaaagatgactccgcgatcgaagaagtgaagaaaattaccgccgaacgccatggcaaagtggttcgtgtcaaacgcgcagaaaaagtgaagaaaaaatttctgggtcgtccgattgaagtttggaaactgtatttcgaacatccgcaggatgtcccggctatccgtgacaaaattcgcgaacacccggcggtcgtggatatctatgaatacgacattccgtttgctaaacgttatctgatcgataaaggcctgattccgatggaaggtgacgaagaactgaaaatgctggcctttgatattgaaaccctgtatcacgaaggcgaagaattcggcaaaggtccgatcctgatgatttcatacgcagacgaagaagaagcgcgtgtgatcacctggaagaaaattgatctgccgtatgttgaagttgtctcgacggaacgtgaaatgatcaaacgttttctgcgcgtcattaaagaaaaagatccggacgtgctgatcacctataacggcgataattttgacttcgcatacctgaaaaaacgctgcgaaaaactgggtatcaaattcacgctgggccgtgatggtagcgaaccgaaaattcaacgtatgggcgatcgctttgcggtggacgttaaaggtcgcattcatttcgatctgtatccggttatccgtcgcaccattaatctgccgacctatacgctggaagcggtttacgaagccatctttggcaaaccgaaagaaaaagtgtacgccgaagaaattgcagaagcttgggaaaccggcgaaggtctggaacgtgtggcccgctattcaatggaagatgcaaaagttacgtacgaactgggtcgtgaatttttcccgatggaagcgcagctgagccgcctgattggccaaccgctgtgggatgtttctcgtagctctaccggtaacctggtcgaatggttcctgctgcgtaaagcgtatgaacgcaacgaactggctccgaataagccggatgaacgcgaactggttcgtcgccgtaacagctataccggcggttacgtcaaagaaccggaacgcggcctgtgggataatatcgtttatctggactttcgtagtctgtacccgtccattatcattacccataacgtgtcaccggacacgctgaatcgtgaaggctgcaaagaatatgatgaagccccgcaagtgggtcacaagttctgtaaagactttccgggcttcattccgtcgctgctgggtaacctgctggatgaacgccagaaaatcaagaaacgtatgaaggcaaccattgatccgctggaaaagaaactgctggactatcgtcaacgcgctatcaaaattctggcgaattcttattacggctattacgcgtatgcgcgtgcgcgctggtactgcaaagaatgtgccgaaagtgtgaccgcatggggccgcgaatatattgaaatgtccatccgtgaaatcgaagaaaagtacggtttcaaggttctgtacgcggataccgacggtttccacgcaacgatcccgggtgccgatgcagaaaccgtgaagaaaaaggcgatggaattcctgaagtacatcaacgctaagctgccgggtgcgctggaactggaatatgaaggcttctacaaacgtggctttttcgtgacgaaaaagaaatacgccgttatcgacgaagaaggcaaaattaccacgcgcggtctggaaatcgtgcgccgtgattggagtgaaattgccaaagaaacccaggcaaaagttctggaagcaatcctgaaacatggtaatgtcgaagaagcagtgaaaattgtcaaggaagtgacggaaaaactgtcgaagtatgaaatcccgccggaaaaactggtgatctacgaacaaattacccgcccgctgcatgaatataaagcgattggcccgcacgtggcagttgctaaacgtctggcagcccgcggtgtcaaagtgcgtccgggcatggtgatcggttatattgttctgcgtggcgatggtccgatcagtaaacgcgcgattctggccgaagaatttgatccgcgcaaacacaagtacgacgccgaatattacatcgaaaaccaggtgctgccggctgttctgcgtattctggaagcgttcggctatcgtaaagaagatctgcgctggcagaaaaccaagcaaacgggtctgaccgcatggctgaatgtgaaaaagaaataa

SEQ ID NO: 447 - DNA, 2328 bp, Artificial Sequence
  Synthetic
atgatcctggacgtggactacattaccgaagacggcaaaccgattatccgcatcttcaaaaaagaaaacggcaaattcaaagtggaatatgatcgtaactttcgcccgtatatttacgctctgctgaaagatgacagccagatcgaagaagtccgcaaaattacggcggaacgtcatggtaaaatcgtgcgcatcatcgatgtggaaaaagttgagaaaaaatttctgggccgtccgattaccgtgtggcgcctgtatttcgaacatccgcaagatgttccggctatccgtgacaaagttcgcgaacacagtgcggtcatcgatatttttgaatatgacattccgttcgctaaacgctacctgatcgataaaggtctgattccgatggaaggcgacgaagaactgaaactgctggcctttgatattgaaacgctgtaccacgaaggtgaagaattcggtaaaggcccgattatcatgatctcctatgcagacgaagaagaagcgaaagtcatcacctggaagaaaattgatctgccgtatgtggaagtggttagctctgaacgtgaaatgatcaaacgctttctgaaaatcatccgcgaaaaagatccggacgttattatcacctataacggtgattcattcgacctgccgtacctggtgaaacgtgccgaaaaactgggcatcaaactgacgattggtcgtgacggctcggaaccgaaaatgcagcgcctgggtgatatgaccgcagtcgaaatcaaaggccgtattcattttgatctgtaccacgtgatcacccgcacgattaacctgccgacctatacgctggaagcggtttacgaagccattttcggtaaaccgaaagaaaaagtctatgccgacgaaatcgcagaagcttgggaaagtggcgaaaatctggaacgcgtggcaaaatattccatggaagatgcgaaagccacctacgaactgggtcgtgaatttctgccgatggaaattcagctgtcacgcctggtgggtcaaccgctgtgggacgtttcgcgtagttccaccggcaatctggttgaatggttcctgctgcgtaaagcgtatgaacgcaacgaactggcaccgaataaaccgtccggccgcgaatacgatgaacgtcgcggcggttatgcgggcggttacgttaaagaaccggaaaagggtctgtgggaaaacatcgtctacctggattacaagagtctgtatccgtccattatcattacccataacgttagtccggacacgctgaatcgcgaaggctgcaaagaatacgatgtggcgccgcaggttggtcaccgtttttgtaaagactttccgggcttcattccgtccctgctgggtgatctgctggaagaacgtcagaaaatcaagcgcaaaatgaaggccaccattgatccgatcgaacgtcgcctgctggactatcgtcaacgcgcgatcaaaattctggccaacagctattacggctattacggttatgcgcgtgcccgctggtactgcaaagaatgtgcagaaagcgttacggcttggggccgcgaatacatcgaaatgtctatccgtgaaatcgaagaaaagtacggtttcaaggtgctgtacgctgataccgacggcttccatgcgacgattccgggtgaagatgccgaaaccatcaaaaagaaagcaatggaattcctgaagtacatcaactcaaagctgccgggcgccctggaactggaatatgaaggcttctaccgtcgcggctttttcgttacgaagaaaaagtacgcagtcattgacgaagaaggcaaaatcaccacgcgcggtctggaaattgtgcgtcgcgattggagtgaaattgccaaagaaacccaggcacgcgttctggaagcaatcctgcgtcatggtgacgtcgaagaagccgttcgcattgtcaaagatgtgacggaaaagctgtcgaaatatgaagtcccgccggaaaaactggtgatccatgaacaaattacccgtgaactgaaggattacaaagcgacgggcccgcacgttgcaattgctaaacgcctggcagcccgtggcatcaagattcgtccgggtaccgttatcagctatattgtcctgaaaggctctggtcgcatcggtgatcgtgctattccgtttgatgaattcgacccgacgaaacaccgttacgatgccgaatattacatcgaaaatcaggtgctgccggccgttgaacgcattctgaaagcatttggctataagaaagaagaactgcgctaccagaaaacccgtcaagtgggcctgggtgcgtggctgaagctgaaaggtaagaaataa

SEQ ID NO: 448 - DNA, 2322 bp, Artificial Sequence
  Synthetic
atgatcctggacgtggactacattaccgaagacggcaaaccgattatccgcatcttcaaaaaagaaaacggcaaattcaaagtggaatatgatcgtaactttcgcccgtatatttacgctctgctgaaagatgacagccagatcgaagaagtccgcaaaattacggcggaacgtcatggtaaaatcgtgcgcatcatcgatgtggaaaaagttgagaaaaaatttctgggccgtccgattaccgtgtggcgcctgtatttcgaacatccgcaagatgttccggctatccgtgacaaagttcgcgaacacagtgcggtcatcgatatttttgaatatgacattccgttcgctaaacgctacctgatcgataaaggtctgattccgatggaaggcgacgaagaactgaaactgctggcctttgatattgaaacgctgtaccacgaaggtgaagaattcggtaaaggcccgattatcatgatctcctatgcagacgaagaagaagcgaaagtcatcacctggaagaaaattgatctgccgtatgtggaagtggttagctctgaacgtgaaatgatcaaacgctttctgaaaatcatccgcgaaaaagatccggacgttattatcacctataacggtgattcattcgacctgccgtacctggtgaaacgtgccgaaaaactgggcatcaaactgacgattggtcgtgacggctcggaaccgaaaatgcagcgcctgggtgatatgaccgcagtcgaaatcaaaggccgtattcattttgatctgtaccacgtgatcacccgcacgattaacctgccgacctatacgctggaagcggtttacgaagccattttcggtaaaccgaaagaaaaagtctatgccgacgaaatcgcagaagcttgggaaagtggcgaaaatctggaacgcgtggcaaaatattccatggaagatgcgaaagccacctacgaactgggtcgtgaatttctgccgatggaaattcagctgtcacgcctggtgggtcaaccgctgtgggacgtttcgcgtagttccaccggcaatctggttgaatggttcctgctgcgtaaagcgtatgaacgcaacgaactggcaccgaataaaccgtccggccgcgaatacgatgaacgtcgcggcggttatgcgggcggttacgttaaagaaccggaaaagggtctgtgggaaaacatcgtctacctggattacaagagtctgtatccgtccattatcattacccataacgttagtccggacacgctgaatcgcgaaggctgcaaagaatacgatgtggcgccgcaggttggtcaccgtttttgtaaagactttccgggcttcattccgtccctgctgggtgatctgctggaagaacgtcagaaaatcaagcgcaaaatgaaggccaccattgatccgatcgaacgtcgcctgctggactatcgtcaacgcgcgatcaaaattctggccaacagctattacggctattacggttatgcgcgtgcccgctggtactgcaaagaatgtgcagaaagcgttacggcttggggccgcgaatacatcgaaatgtctatccgtgaaatcgaagaaaagtacggtttcaaggtgctgtacgctgataccgacggcttccatgcgacgattccgggtgaagatgccgaaaccatcaaaaagaaagcaatggaattcctgaagtacatcaactcaaagctgccgggcgccctggaactggaatatgaaggcttctaccgtcgcggctttttcgttacgaagaaaaagtacgcagtcattgacgaagaaggcaaaatcaccacgcgcggtctggaaattgtgcgtcgcgattggagtgaaattgccaaagaaacccaggcacgtgtcctggaagcaatcctgaaacatggtgatgtggaagaagcggttcgcattgtcaaagaagtgacggaaaagctgtcgaaatatgaagttccgccggaaaaactggtcatccatgaacaaattacccgcgatctgcgtgactacaaagccacgggtccgcacgtggcagttgcaaaacgtctggcagcccgtggcgtgaagattcgtccgggtaccgtgatcagttatattgttctgaaaggctccggtcgcatcggtgaccgtgctattccgtttgatgaattcgacccgacgaaacaccgttacgatgccgaatattacatcgaaaatcaggtcctgccggccgtggaacgcattctgaaagcatttggttatcgcaaggaagatctgcgttaccagaagaccaaacaagtcggcctgggtgcgtggctgaaagtgaaaaagtaa

SEQ ID NO: 449 - DNA, 2328 bp, Artificial Sequence
  Synthetic
atgatcctggacgtggactacattaccgaagacggcaaaccgattatccgcatcttcaaaaaagaaaacggcaaattcaaagtggaatatgatcgtaactttcgcccgtatatttacgctctgctgaaagatgacagccagatcgaagaagtccgcaaaattacggcggaacgtcatggtaaaatcgtgcgcatcatcgatgtggaaaaagttgagaaaaaatttctgggccgtccgattaccgtgtggcgcctgtatttcgaacatccgcaagatgttccggctatccgtgacaaagttcgcgaacacagtgcggtcatcgatatttttgaatatgacattccgttcgctaaacgctacctgatcgataaaggtctgattccgatggaaggcgacgaagaactgaaactgctggcctttgatattgaaacgctgtaccacgaaggtgaagaattcggtaaaggcccgattatcatgatctcctatgcagacgaagaagaagcgaaagtcatcacctggaagaaaattgatctgccgtatgtggaagtggttagctctgaacgtgaaatgatcaaacgctttctgaaaatcatccgcgaaaaagatccggacgttattatcacctataacggtgattcattcgacctgccgtacctggtgaaacgtgccgaaaaactgggcatcaaactgacgattggtcgtgacggctcggaaccgaaaatgcagcgcctgggtgatatgaccgcagtcgaaatcaaaggccgtattcattttgatctgtaccacgtgatcacccgcacgattaacctgccgacctatacgctggaagcggtttacgaagccattttcggtaaaccgaaagaaaaagtctatgccgacgaaatcgcagaagcttgggaaagtggcgaaaatctggaacgcgtggcaaaatattccatggaagatgcgaaagccacctacgaactgggtcgtgaatttctgccgatggaaattcagctgtcacgcctggtgggtcaaccgctgtgggacgtttcgcgtagttccaccggcaatctggttgaatggttcctgctgcgtaaagcgtatgaacgcaacgaactggcaccgaataaaccgtccggccgcgaatacgatgaacgtcgcggcggttatgcgggcggttacgttaaagaaccggaaaagggtctgtgggaaaacatcgtctacctggattacaagagtctgtatccgtccattatcattacccataacgttagtccggacacgctgaatcgcgaaggctgcaaagaatacgatgtggcgccgcaggttggtcaccgtttttgtaaagactttccgggcttcattccgtccctgctgggtgatctgctggaagaacgtcagaaaatcaagcgcaaaatgaaggccaccattgatccgatcgaacgtcgcctgctggactatcgtcaacgcgcgatcaaaattctggccaacagctattacggctattacggttatgcgcgtgcccgctggtactgcaaagaatgtgcagaaagcgttacggcttggggccgcgaatacatcgaaatgtctatccgtgaaatcgaagaaaagtacggtttcaaggtgctgtacgctgataccgacggcttccatgcgacgattccgggtgaagatgccgaaaccatcaaaaagaaagcaatggaattcctgaagtacatcaactcaaagctgccgggcgccctggaactggaatatgaaggcttctaccgtcgcggctttttcgttacgaagaaaaagtacgcagtcattgacgaagaaggcaaaatcaccacgcgcggtctggaaattgtgcgtcgcgattggagtgaaattgccaaagaaacccaggcacgtgtgctggaagctctgctgaaagatggcaatgttgaagaagcggtttccattgtcaaagaagtgacggaaaagctgggtaaatatgaagtcccgccggaaaaactggtgatccatgaacaaattacccgcgaactgaaggattacaaagcgacgggcccgcacgttgctatcgcgaaacgtctggcagcgcgtggcgtgaagattcgtccgggtaccgttatcagctatattgtcctgaaaggctctggtcgtatcggtgaccgcgcgattccgtttgatgaattcgacccgacgaaacatcgctacgatgcagaatattacatcgaaaaccaggttctgccggctgtcgaacgtattctgaaagcgtttggctatcgtgccgaagatctgcgctaccagaaaacccgtcaagtgggcctgggtgtttggctgcaaccgaaaggtaagaaataa

SEQ ID NO: 450 - DNA, 2325 bp, Artificial Sequence
  Synthetic
atgatcctggacgtggactacattaccgaagacggcaaaccgattatccgcatcttcaaaaaagaaaacggcaaattcaaagtggaatatgatcgtaactttcgcccgtatatttacgctctgctgaaagatgacagccagatcgaagaagtccgcaaaattacggcggaacgtcatggtaaaatcgtgcgcatcatcgatgtggaaaaagttgagaaaaaatttctgggccgtccgattaccgtgtggcgcctgtatttcgaacatccgcaagatgttccggctatccgtgacaaagttcgcgaacacagtgcggtcatcgatatttttgaatatgacattccgttcgctaaacgctacctgatcgataaaggtctgattccgatggaaggcgacgaagaactgaaactgctggcctttgatattgaaacgctgtaccacgaaggtgaagaattcggtaaaggcccgattatcatgatctcctatgcagacgaagaagaagcgaaagtcatcacctggaagaaaattgatctgccgtatgtggaagtggttagctctgaacgtgaaatgatcaaacgctttctgaaaatcatccgcgaaaaagatccggacgttattatcacctataacggtgattcattcgacctgccgtacctggtgaaacgtgccgaaaaactgggcatcaaactgacgattggtcgtgacggctcggaaccgaaaatgcagcgcctgggtgatatgaccgcagtcgaaatcaaaggccgtattcattttgatctgtaccacgtgatcacccgcacgattaacctgccgacctatacgctggaagcggtttacgaagccattttcggtaaaccgaaagaaaaagtctatgccgacgaaatcgcagaagcttgggaaagtggcgaaaatctggaacgcgtggcaaaatattccatggaagatgcgaaagccacctacgaactgggtcgtgaatttctgccgatggaaattcagctgtcacgcctggtgggtcaaccgctgtgggacgtttcgcgtagttccaccggcaatctggttgaatggttcctgctgcgtaaagcgtatgaacgcaacgaactggcaccgaataaaccgtccggccgcgaatacgatgaacgtcgcggcggttatgcgggcggttacgttaaagaaccggaaaagggtctgtgggaaaacatcgtctacctggattacaagagtctgtatccgtccattatcattacccataacgttagtccggacacgctgaatcgcgaaggctgcaaagaatacgatgtggcgccgcaggttggtcaccgtttttgtaaagactttccgggcttcattccgtccctgctgggtgatctgctggaagaacgtcagaaaatcaagcgcaaaatgaaggccaccattgatccgatcgaacgtcgcctgctggactatcgtcaacgcgcgatcaaaattctggccaacagctattacggctattacggttatgcgcgtgcccgctggtactgcaaagaatgtgcagaaagcgttacggcttggggccgcgaatacatcgaaatgtctatccgtgaaatcgaagaaaagtacggtttcaaggtgctgtacgctgataccgacggcttccatgcgacgattccgggtgaagatgccgaaaccatcaaaaagaaagcaatggaattcctgaagtacatcaactcaaagctgccgggcgccctggaactggaatatgaaggcttctaccgtcgcggctttttcgttacgaagaaaaagtacgcagtcattgacgaagaaggcaaaatcaccacgcgcggtctggaaattgtgcgtcgcgattggagtgaaattgccaaagaaacccaggcaaaggttctggaagcaattctgaaacatggtaacgtcgaagaagcggtcaagatcgtgaaagaagttaccgaaaaactgtcgaattatgaaattccggtcgaaaagctggtgatctacgaacaaattacgcgcccgctgaacgaatataaagccattggcccgcacgtggcagttgctaaacgtctggcggccaagggtatcaagattaaaccgggcatggtgattggttatgttgtcctgcgcggcgatggtccgatcagcaaacgtgcgatcgccatcgaagaattcgatggcaaaaagcataagtacgacgcagaatactacatcgaaaatcaggttctgccggccgtcgaacgtatcctgaaagcattcggttataagcgtgaagatctgcgctggcagaagaccaaacaagtgggcctgggtgcgtggctgaaagttaaaaagtcttaa

SEQ ID NO: 451 - DNA, 2328 bp, Artificial Sequence
  Synthetic
atgatcctggacgtggactacattaccgaagacggcaaaccgattatccgcatcttcaaaaaagaaaacggcaaattcaaagtggaatatgatcgtaactttcgcccgtatatttacgctctgctgaaagatgacagccagatcgaagaagtccgcaaaattacggcggaacgtcatggtaaaatcgtgcgcatcatcgatgtggaaaaagttgagaaaaaatttctgggccgtccgattaccgtgtggcgcctgtatttcgaacatccgcaagatgttccggctatccgtgacaaagttcgcgaacacagtgcggtcatcgatatttttgaatatgacattccgttcgctaaacgctacctgatcgataaaggtctgattccgatggaaggcgacgaagaactgaaactgctggcctttgatattgaaacgctgtaccacgaaggtgaagaattcggtaaaggcccgattatcatgatctcctatgcagacgaagaagaagcgaaagtcatcacctggaagaaaattgatctgccgtatgtggaagtggttagctctgaacgtgaaatgatcaaacgctttctgaaaatcatccgcgaaaaagatccggacgttattatcacctataacggtgattcattcgacctgccgtacctggtgaaacgtgccgaaaaactgggcatcaaactgacgattggtcgtgacggctcggaaccgaaaatgcagcgcctgggtgatatgaccgcagtcgaaatcaaaggccgtattcattttgatctgtaccacgtgatcacccgcacgattaacctgccgacctatacgctggaagcggtttacgaagccattttcggtaaaccgaaagaaaaagtctatgccgacgaaatcgcagaagcttgggaaagtggcgaaaatctggaacgcgtggcaaaatattccatggaagatgcgaaagccacctacgaactgggtcgtgaatttctgccgatggaaattcagctgtcacgcctggtgggtcaaccgctgtgggacgtttcgcgtagttccaccggcaatctggttgaatggttcctgctgcgtaaagcgtatgaacgcaacgaactggcaccgaataaaccgtccggccgcgaatacgatgaacgtcgcggcggttatgcgggcggttacgttaaagaaccggaaaagggtctgtgggaaaacatcgtctacctggattacaagagtctgtatccgtccattatcattacccataacgttagtccggacacgctgaatcgcgaaggctgcaaagaatacgatgtggcgccgcaggttggtcaccgtttttgtaaagactttccgggcttcattccgtccctgctgggtgatctgctggaagaacgtcagaaaatcaagcgcaaaatgaaggccaccattgatccgatcgaacgtcgcctgctggactatcgtcaacgcgcgatcaaaattctggccaacagctattacggctattacggttatgcgcgtgcccgctggtactgcaaagaatgtgcagaaagcgttacggcttggggccgcgaatacatcgaaatgtctatccgtgaaatcgaagaaaagtacggtttcaaggtgctgtacgctgataccgacggcttccatgcgacgattccgggtgaagatgccgaaaccatcaaaaagaaagcaatggaattcctgaagtacatcaactcaaagctgccgggcgccctggaactggaatatgaaggcttctaccgtcgcggctttttcgttacgaagaaaaagtacgcagtcattgacgaagaaggcaaaatcaccacgcgcggtctggaaattgtgcgtcgcgattggagtgaaattgccaaagaaacccaggcacgtgttctggaagcactgctgaaagatggtaatgtcgaagaagcagtgagtattgttaaagaagtcacggaaaaactgtccaagtatgaagtcccgccggaaaaactggtgattcatgaacaaatcacccgcgaactgaaagattacaaggcgacgggcccgcacgtggcaattgctaaacgtctggcagcgcgtggcgttaagatccgtccgggtaccgttattagctatatcgtcctgaaaggctctggtcgtattggtgaccgcgccatcccgtttgatgaattcgacccggctaaacaccgctacgatgcggaatattacattgaaaatcaggtcctgccggctgtggaacgtatcctgaaagcgtttggctatcgtaaggaagatctgcgctaccagaaaacccgtcaagtgggcctgggtgcgtggctgaaaccgaagggtaaaaagtaa

SEQ ID NO: 452 - DNA, 2328 bp, Artificial Sequence
  Synthetic
atgatcctggacgtggactacattaccgaagacggcaaaccgattatccgcatcttcaaaaaagaaaacggcaaattcaaagtggaatatgatcgtaactttcgcccgtatatttacgctctgctgaaagatgacagccagatcgaagaagtccgcaaaattacggcggaacgtcatggtaaaatcgtgcgcatcatcgatgtggaaaaagttgagaaaaaatttctgggccgtccgattaccgtgtggcgcctgtatttcgaacatccgcaagatgttccggctatccgtgacaaagttcgcgaacacagtgcggtcatcgatatttttgaatatgacattccgttcgctaaacgctacctgatcgataaaggtctgattccgatggaaggcgacgaagaactgaaactgctggcctttgatattgaaacgctgtaccacgaaggtgaagaattcggtaaaggcccgattatcatgatctcctatgcagacgaagaagaagcgaaagtcatcacctggaagaaaattgatctgccgtatgtggaagtggttagctctgaacgtgaaatgatcaaacgctttctgaaaatcatccgcgaaaaagatccggacgttattatcacctataacggtgattcattcgacctgccgtacctggtgaaacgtgccgaaaaactgggcatcaaactgacgattggtcgtgacggctcggaaccgaaaatgcagcgcctgggtgatatgaccgcagtcgaaatcaaaggccgtattcattttgatctgtaccacgtgatcacccgcacgattaacctgccgacctatacgctggaagcggtttacgaagccattttcggtaaaccgaaagaaaaagtctatgccgacgaaatcgcagaagcttgggaaagtggcgaaaatctggaacgcgtggcaaaatattccatggaagatgcgaaagccacctacgaactgggtcgtgaatttctgccgatggaaattcagctgtcacgcctggtgggtcaaccgctgtgggacgtttcgcgtagttccaccggcaatctggttgaatggttcctgctgcgtaaagcgtatgaacgcaacgaactggcaccgaataaaccgtccggccgcgaatacgatgaacgtcgcggcggttatgcgggcggttacgttaaagaaccggaaaagggtctgtgggaaaacatcgtctacctggattacaagagtctgtatccgtccattatcattacccataacgttagtccggacacgctgaatcgcgaaggctgcaaagaatacgatgtggcgccgcaggttggtcaccgtttttgtaaagactttccgggcttcattccgtccctgctgggtgatctgctggaagaacgtcagaaaatcaagcgcaaaatgaaggccaccattgatccgatcgaacgtcgcctgctggactatcgtcaacgcgcgatcaaaattctggccaacagctattacggctattacggttatgcgcgtgcccgctggtactgcaaagaatgtgcagaaagcgttacggcttggggccgcgaatacatcgaaatgtctatccgtgaaatcgaagaaaagtacggtttcaaggtgctgtacgctgataccgacggcttccatgcgacgattccgggtgaagatgccgaaaccatcaaaaagaaagcaatggaattcctgaagtacatcaactcaaagctgccgggcgccctggaactggaatatgaaggcttctaccgtcgcggctttttcgttacgaagaaaaagtacgcagtcattgacgaagaaggcaaaatcaccacgcgcggtctggaaattgtgcgtcgcgattggagtgaaattgccaaagaaacccaggcacgcgtcctggaagcaatcctgaaagatggtgacgtggaagaagccgtccgtattgtgaaagaagttacggaaaaactgtccaaatatgaagttccgccggaaaaactggtcatccatgaacaaattacccgcgaactgaaagattacaaagcgacgggcccgcacgtcgcaatcgctaaacgtctggcggcgcgtggcgtgaaaattcgtccgggtaccgtgatctcatatattgttctgaaaggctcgggtcgtatcggtgaccgcgctattccgtttgatgaattcgacccgaaaaaacacaaatacgatgcggaatactacatcgaaaaccaggttctgccggccgtcgaacgtattctgcgcgcatttggctaccgtaaagaagatctgcgttatcaaaaaaccaaacaagtgggtctgggtgcgtggctgaaaccgaaaggtaaaaaataa

SEQ ID NO: 453 - DNA, 2325 bp, Artificial Sequence
  Synthetic
atgatcctggacgtggactacattaccgaagacggcaaaccgattatccgcatcttcaaaaaagaaaacggcaaattcaaagtggaatatgatcgtaactttcgcccgtatatttacgctctgctgaaagatgacagccagatcgaagaagtccgcaaaattacggcggaacgtcatggtaaaatcgtgcgcatcatcgatgtggaaaaagttgagaaaaaatttctgggccgtccgattaccgtgtggcgcctgtatttcgaacatccgcaagatgttccggctatccgtgacaaagttcgcgaacacagtgcggtcatcgatatttttgaatatgacattccgttcgctaaacgctacctgatcgataaaggtctgattccgatggaaggcgacgaagaactgaaactgctggcctttgatattgaaacgctgtaccacgaaggtgaagaattcggtaaaggcccgattatcatgatctcctatgcagacgaagaagaagcgaaagtcatcacctggaagaaaattgatctgccgtatgtggaagtggttagctctgaacgtgaaatgatcaaacgctttctgaaaatcatccgcgaaaaagatccggacgttattatcacctataacggtgattcattcgacctgccgtacctggtgaaacgtgccgaaaaactgggcatcaaactgacgattggtcgtgacggctcggaaccgaaaatgcagcgcctgggtgatatgaccgcagtcgaaatcaaaggccgtattcattttgatctgtaccacgtgatcacccgcacgattaacctgccgacctatacgctggaagcggtttacgaagccattttcggtaaaccgaaagaaaaagtctatgccgacgaaatcgcagaagcttgggaaagtggcgaaaatctggaacgcgtggcaaaatattccatggaagatgcgaaagccacctacgaactgggtcgtgaatttctgccgatggaaattcagctgtcacgcctggtgggtcaaccgctgtgggacgtttcgcgtagttccaccggcaatctggttgaatggttcctgctgcgtaaagcgtatgaacgcaacgaactggcaccgaataaaccgtccggccgcgaatacgatgaacgtcgcggcggttatgcgggcggttacgttaaagaaccggaaaagggtctgtgggaaaacatcgtctacctggattacaagagtctgtatccgtccattatcattacccataacgttagtccggacacgctgaatcgcgaaggctgcaaagaatacgatgtggcgccgcaggttggtcaccgtttttgtaaagactttccgggcttcattccgtccctgctgggtgatctgctggaagaacgtcagaaaatcaagcgcaaaatgaaggccaccattgatccgatcgaacgtcgcctgctggactatcgtcaacgcgcgatcaaaattctggccaacagctattacggctattacggttatgcgcgtgcccgctggtactgcaaagaatgtgcagaaagcgttacggcttggggccgcgaatacatcgaaatgtctatccgtgaaatcgaagaaaagtacggtttcaaggtgctgtacgctgataccgacggcttccatgcgacgattccgggtgaagatgccgaaaccatcaaaaagaaagcaatggaattcctgaagtacatcaactcaaagctgccgggcgccctggaactggaatatgaaggcttctaccgtcgcggctttttcgttacgaagaaaaagtacgcagtcattgacgaagaaggcaaaatcaccacgcgcggtctggaaattgtgcgtcgcgattggagtgaaattgccaaagaaacccaggcacgtgttctggaagcaattctgaaacatggtaacgtcgaagaagcggtcaaaatcgtgaaagaagttacggaaaaactgtctaactacgaaattccgccggaaaaactggccatctacgaacaaattacccgcccgctgcatgaatataaagcaatcggtccgcacgtcgcagtggcaaaacgtctggcagcacgcggcgttaaagtcaaaccgggtatggtcatcggctatattgtgctgcgtggtgatggcccgatcagcaaccgcgcaattctggctgaagaatacgatctgaaaaaacacaaatacgacgccgaatattacatcgaaaatcaggttctgccggctgtcctgcgtattctggaagcgtttggctatcgtaaagaagatctgcgctggcagaaaacccgtcaaacgggtctgacctcatggctgaatattaaaaaatcgtaa

SEQ ID NO: 454 - DNA, 2325 bp, Artificial Sequence
  Synthetic
atgatcctggacgtggactacattaccgaagacggcaaaccgattatccgcatcttcaaaaaagaaaacggcaaattcaaagtggaatatgatcgtaactttcgcccgtatatttacgctctgctgaaagatgacagccagatcgaagaagtccgcaaaattacggcggaacgtcatggtaaaatcgtgcgcatcatcgatgtggaaaaagttgagaaaaaatttctgggccgtccgattaccgtgtggcgcctgtatttcgaacatccgcaagatgttccggctatccgtgacaaagttcgcgaacacagtgcggtcatcgatatttttgaatatgacattccgttcgctaaacgctacctgatcgataaaggtctgattccgatggaaggcgacgaagaactgaaactgctggcctttgatattgaaacgctgtaccacgaaggtgaagaattcggtaaaggcccgattatcatgatctcctatgcagacgaagaagaagcgaaagtcatcacctggaagaaaattgatctgccgtatgtggaagtggttagctctgaacgtgaaatgatcaaacgctttctgaaaatcatccgcgaaaaagatccggacgttattatcacctataacggtgattcattcgacctgccgtacctggtgaaacgtgccgaaaaactgggcatcaaactgacgattggtcgtgacggctcggaaccgaaaatgcagcgcctgggtgatatgaccgcagtcgaaatcaaaggccgtattcattttgatctgtaccacgtgatcacccgcacgattaacctgccgacctatacgctggaagcggtttacgaagccattttcggtaaaccgaaagaaaaagtctatgccgacgaaatcgcagaagcttgggaaagtggcgaaaatctggaacgcgtggcaaaatattccatggaagatgcgaaagccacctacgaactgggtcgtgaatttctgccgatggaaattcagctgtcacgcctggtgggtcaaccgctgtgggacgtttcgcgtagttccaccggcaatctggttgaatggttcctgctgcgtaaagcgtatgaacgcaacgaactggcaccgaataaaccgtccggccgcgaatacgatgaacgtcgcggcggttatgcgggcggttacgttaaagaaccggaaaagggtctgtgggaaaacatcgtctacctggattacaagagtctgtatccgtccattatcattacccataacgttagtccggacacgctgaatcgcgaaggctgcaaagaatacgatgtggcgccgcaggttggtcaccgtttttgtaaagactttccgggcttcattccgtccctgctgggtgatctgctggaagaacgtcagaaaatcaagcgcaaaatgaaggccaccattgatccgatcgaacgtcgcctgctggactatcgtcaacgcgcgatcaaaattctggccaacagctattacggctattacggttatgcgcgtgcccgctggtactgcaaagaatgtgcagaaagcgttacggcttggggccgcgaatacatcgaaatgtctatccgtgaaatcgaagaaaagtacggtttcaaggtgctgtacgctgataccgacggcttccatgcgacgattccgggtgaagatgccgaaaccatcaaaaagaaagcaatggaattcctgaagtacatcaactcaaagctgccgggcgccctggaactggaatatgaaggcttctaccgtcgcggctttttcgttacgaagaaaaagtacgcagtcattgacgaagaaggcaaaatcaccacgcgcggtctggaaattgtgcgtcgcgattggagtgaaattgccaaagaaacccaggcaaaagttctggaagcaatcctgaaacatggtaatgtcgaagaagcagtgaaaattgtcaaggaagtgacggaaaaactgtcgaagtatgaaatcccgccggaaaaactggtgatctacgaacaaattacccgcccgctgcatgaatataaagcgattggcccgcacgtggcagttgctaaacgtctggcagcccgcggtgtcaaagtgcgtccgggcatggtgatcggttatattgttctgcgtggcgatggtccgatcagtaaacgcgcgattctggccgaagaatttgatccgcgcaaacacaagtacgacgccgaatattacatcgaaaaccaggtgctgccggctgttctgcgtattctggaagcgttcggctatcgtaaagaagatctgcgctggcagaaaaccaagcaaacgggtctgaccgcatggctgaatgtgaaaaagaaataa

SEQ ID NO: 455 - DNA, 2331 bp, Artificial Sequence
  Synthetic
atgatcctggacgtggactacattaccgaagacggcaaaccgattatccgcatcttcaaaaaagaaaacggcaaattcaaagtggaatatgatcgtaactttcgcccgtatatttacgctctgctgaaagatgacagccagatcgaagaagtccgcaaaattacggcggaacgtcatggtaaaatcgtgcgcatcatcgatgtggaaaaagttgagaaaaaatttctgggccgtccgattaccgtgtggcgcctgtatttcgaacatccgcaagatgttccggctatccgtgacaaagttcgcgaacacagtgcggtcatcgatatttttgaatatgacattccgttcgctaaacgctacctgatcgataaaggtctgattccgatggaaggcgacgaagaactgaaactgctggcctttgatattgaaacgctgtaccacgaaggtgaagaattcggtaaaggcccgattatcatgatctcctatgcagacgaagaagaagcgaaagtcatcacctggaagaaaattgatctgccgtatgtggaagtggttagctctgaacgtgaaatgatcaaacgctttctgaaaatcatccgcgaaaaagatccggacgttattatcacctataacggtgattcattcgacctgccgtacctggtgaaacgtgccgaaaaactgggcatcaaactgacgattggtcgtgacggctcggaaccgaaaatgcagcgcctgggtgatatgaccgcagtcgaaatcaaaggccgtattcattttgatctgtaccacgtgatcacccgcacgattaacctgccgacctatacgctggaagcggtttacgaagccattttcggtaaaccgaaagaaaaagtctatgccgacgaaatcgcagaagcttgggaaagtggcgaaaatctggaacgcgtggcaaaatattccatggaagatgcgaaagccacctacgaactgggtcgtgaatttctgccgatggaaattcagctgtcacgcctggtgggtcaaccgctgtgggacgtttcgcgtagttccaccggcaatctggttgaatggttcctgctgcgtaaagcgtatgaacgcaacgaactggcgccgaataaaccggatgaacgcgaatatgaacgtcgcctgcgtgaaagttatgaaggcggttacgttaaagaaccggaacgcggcctgtgggaaggtattgtgtcactggattttcgtagtctgtacccgtccattatcattacccataacgtttcgccggatacgctgaataaagaaggctgcggtgaatatgacgaagccccggaagtgggtcaccgcttctgtaaagattttccgggcttcattccgtcactgctgggttcgctgctggaagaacgccagaagatcaagaaacgtatgaaggaatctaaggatccggtggaacgcaaactgctggactatcgtcaacgcgcgatcaagattctggccaacagcttttatggctattacggttacgcgaaagcccgttggtactgcaaggaatgtgcagaaagcgtgaccgcttggggccgccagtatattgaactggtccgtcgcgaactggaagaacgtggttttaaagtgctgtatatcgataccgacggcctgtacgccacgattccgggtgaaaagaactgggaagaaatcaagcgtcgcgcactggaatttgttaactacatcaattccaaactgccgggcattctggaactggaatatgaaggcttctacacccgtggctttttcgtgacgaagaaaaagtatgcgctgatcgatgaagaaggcaaaattgtcacccgtggtctggaaatcgtgcgtcgcgattggagtgaaattgccaaagaaacccaggcacgcgttctggaagcaatcctgcgtcatggtgacgtcgaagaagccgttcgcattgtcaaagatgtgacggaaaagctgtcgaaatatgaagtcccgccggaaaaactggtgatccatgaacaaattacccgtgaactgaaggattacaaagcgacgggcccgcacgttgcaattgctaaacgcctggcagcccgtggcatcaagattcgtccgggtaccgttatcagctatattgtcctgaaaggctctggtcgcatcggtgatcgtgctattccgtttgatgaattcgacccgacgaaacaccgttacgatgccgaatattacatcgaaaatcaggtgctgccggccgttgaacgcattctgaaagcatttggctataagaaagaagaactgcgctaccagaaaacccgtcaagtgggcctgggtgcgtggctgaagctgaaaggtaagaaataa

SEQ ID NO: 456 - DNA, 2325 bp, Artificial Sequence
  Synthetic
atgatcctggacgtggactacattaccgaagacggcaaaccgattatccgcatcttcaaaaaagaaaacggcaaattcaaagtggaatatgatcgtaactttcgcccgtatatttacgctctgctgaaagatgacagccagatcgaagaagtccgcaaaattacggcggaacgtcatggtaaaatcgtgcgcatcatcgatgtggaaaaagttgagaaaaaatttctgggccgtccgattaccgtgtggcgcctgtatttcgaacatccgcaagatgttccggctatccgtgacaaagttcgcgaacacagtgcggtcatcgatatttttgaatatgacattccgttcgctaaacgctacctgatcgataaaggtctgattccgatggaaggcgacgaagaactgaaactgctggcctttgatattgaaacgctgtaccacgaaggtgaagaattcggtaaaggcccgattatcatgatctcctatgcagacgaagaagaagcgaaagtcatcacctggaagaaaattgatctgccgtatgtggaagtggttagctctgaacgtgaaatgatcaaacgctttctgaaaatcatccgcgaaaaagatccggacgttattatcacctataacggtgattcattcgacctgccgtacctggtgaaacgtgccgaaaaactgggcatcaaactgacgattggtcgtgacggctcggaaccgaaaatgcagcgcctgggtgatatgaccgcagtcgaaatcaaaggccgtattcattttgatctgtaccacgtgatcacccgcacgattaacctgccgacctatacgctggaagcggtttacgaagccattttcggtaaaccgaaagaaaaagtctatgccgacgaaatcgcagaagcttgggaaagtggcgaaaatctggaacgcgtggcaaaatattccatggaagatgcgaaagccacctacgaactgggtcgtgaatttctgccgatggaaattcagctgtcacgcctggtgggtcaaccgctgtgggacgtttcgcgtagttccaccggcaatctggttgaatggttcctgctgcgtaaagcgtatgaacgcaacgaactggcgccgaataaaccggatgaacgcgaatatgaacgtcgcctgcgtgaaagttatgaaggcggttacgttaaagaaccggaacgcggcctgtgggaaggtattgtgtcactggattttcgtagtctgtacccgtccattatcattacccataacgtttcgccggatacgctgaataaagaaggctgcggtgaatatgacgaagccccggaagtgggtcaccgcttctgtaaagattttccgggcttcattccgtcactgctgggttcgctgctggaagaacgccagaagatcaagaaacgtatgaaggaatctaaggatccggtggaacgcaaactgctggactatcgtcaacgcgcgatcaagattctggccaacagcttttatggctattacggttacgcgaaagcccgttggtactgcaaggaatgtgcagaaagcgtgaccgcttggggccgccagtatattgaactggtccgtcgcgaactggaagaacgtggttttaaagtgctgtatatcgataccgacggcctgtacgccacgattccgggtgaaaagaactgggaagaaatcaagcgtcgcgcactggaatttgttaactacatcaattccaaactgccgggcattctggaactggaatatgaaggcttctacacccgtggctttttcgtgacgaagaaaaagtatgcgctgatcgatgaagaaggcaaaattgtcacccgtggtctggaaatcgtgcgtcgcgattggagtgaaattgccaaagaaacccaggcacgtgtcctggaagcaatcctgaaacatggtgatgtggaagaagcggttcgcattgtcaaagaagtgacggaaaagctgtcgaaatatgaagttccgccggaaaaactggtcatccatgaacaaattacccgcgatctgcgtgactacaaagccacgggtccgcacgtggcagttgcaaaacgtctggcagcccgtggcgtgaagattcgtccgggtaccgtgatcagttatattgttctgaaaggctccggtcgcatcggtgaccgtgctattccgtttgatgaattcgacccgacgaaacaccgttacgatgccgaatattacatcgaaaatcaggtcctgccggccgtggaacgcattctgaaagcatttggttatcgcaaggaagatctgcgttaccagaagaccaaacaagtcggcctgggtgcgtggctgaaagtgaaaaagtaa

SEQ ID NO: 457 - DNA, 2331 bp, Artificial Sequence
  Synthetic
atgatcctggacgtggactacattaccgaagacggcaaaccgattatccgcatcttcaaaaaagaaaacggcaaattcaaagtggaatatgatcgtaactttcgcccgtatatttacgctctgctgaaagatgacagccagatcgaagaagtccgcaaaattacggcggaacgtcatggtaaaatcgtgcgcatcatcgatgtggaaaaagttgagaaaaaatttctgggccgtccgattaccgtgtggcgcctgtatttcgaacatccgcaagatgttccggctatccgtgacaaagttcgcgaacacagtgcggtcatcgatatttttgaatatgacattccgttcgctaaacgctacctgatcgataaaggtctgattccgatggaaggcgacgaagaactgaaactgctggcctttgatattgaaacgctgtaccacgaaggtgaagaattcggtaaaggcccgattatcatgatctcctatgcagacgaagaagaagcgaaagtcatcacctggaagaaaattgatctgccgtatgtggaagtggttagctctgaacgtgaaatgatcaaacgctttctgaaaatcatccgcgaaaaagatccggacgttattatcacctataacggtgattcattcgacctgccgtacctggtgaaacgtgccgaaaaactgggcatcaaactgacgattggtcgtgacggctcggaaccgaaaatgcagcgcctgggtgatatgaccgcagtcgaaatcaaaggccgtattcattttgatctgtaccacgtgatcacccgcacgattaacctgccgacctatacgctggaagcggtttacgaagccattttcggtaaaccgaaagaaaaagtctatgccgacgaaatcgcagaagcttgggaaagtggcgaaaatctggaacgcgtggcaaaatattccatggaagatgcgaaagccacctacgaactgggtcgtgaatttctgccgatggaaattcagctgtcacgcctggtgggtcaaccgctgtgggacgtttcgcgtagttccaccggcaatctggttgaatggttcctgctgcgtaaagcgtatgaacgcaacgaactggcgccgaataaaccggatgaacgcgaatatgaacgtcgcctgcgtgaaagttatgaaggcggttacgttaaagaaccggaacgcggcctgtgggaaggtattgtgtcactggattttcgtagtctgtacccgtccattatcattacccataacgtttcgccggatacgctgaataaagaaggctgcggtgaatatgacgaagccccggaagtgggtcaccgcttctgtaaagattttccgggcttcattccgtcactgctgggttcgctgctggaagaacgccagaagatcaagaaacgtatgaaggaatctaaggatccggtggaacgcaaactgctggactatcgtcaacgcgcgatcaagattctggccaacagcttttatggctattacggttacgcgaaagcccgttggtactgcaaggaatgtgcagaaagcgtgaccgcttggggccgccagtatattgaactggtccgtcgcgaactggaagaacgtggttttaaagtgctgtatatcgataccgacggcctgtacgccacgattccgggtgaaaagaactgggaagaaatcaagcgtcgcgcactggaatttgttaactacatcaattccaaactgccgggcattctggaactggaatatgaaggcttctacacccgtggctttttcgtgacgaagaaaaagtatgcgctgatcgatgaagaaggcaaaattgtcacccgtggtctggaaatcgtgcgtcgcgattggagtgaaattgccaaagaaacccaggcacgtgtgctggaagctctgctgaaagatggcaatgttgaagaagcggtttccattgtcaaagaagtgacggaaaagctgggtaaatatgaagtcccgccggaaaaactggtgatccatgaacaaattacccgcgaactgaaggattacaaagcgacgggcccgcacgttgctatcgcgaaacgtctggcagcgcgtggcgtgaagattcgtccgggtaccgttatcagctatattgtcctgaaaggctctggtcgtatcggtgaccgcgcgattccgtttgatgaattcgacccgacgaaacatcgctacgatgcagaatattacatcgaaaaccaggttctgccggctgtcgaacgtattctgaaagcgtttggctatcgtgccgaagatctgcgctaccagaaaacccgtcaagtgggcctgggtgtttggctgcaaccgaaaggtaagaaataa

SEQ ID NO: 458 - DNA, 2328 bp, Artificial Sequence
  Synthetic
atgatcctggacgtggactacattaccgaagacggcaaaccgattatccgcatcttcaaaaaagaaaacggcaaattcaaagtggaatatgatcgtaactttcgcccgtatatttacgctctgctgaaagatgacagccagatcgaagaagtccgcaaaattacggcggaacgtcatggtaaaatcgtgcgcatcatcgatgtggaaaaagttgagaaaaaatttctgggccgtccgattaccgtgtggcgcctgtatttcgaacatccgcaagatgttccggctatccgtgacaaagttcgcgaacacagtgcggtcatcgatatttttgaatatgacattccgttcgctaaacgctacctgatcgataaaggtctgattccgatggaaggcgacgaagaactgaaactgctggcctttgatattgaaacgctgtaccacgaaggtgaagaattcggtaaaggcccgattatcatgatctcctatgcagacgaagaagaagcgaaagtcatcacctggaagaaaattgatctgccgtatgtggaagtggttagctctgaacgtgaaatgatcaaacgctttctgaaaatcatccgcgaaaaagatccggacgttattatcacctataacggtgattcattcgacctgccgtacctggtgaaacgtgccgaaaaactgggcatcaaactgacgattggtcgtgacggctcggaaccgaaaatgcagcgcctgggtgatatgaccgcagtcgaaatcaaaggccgtattcattttgatctgtaccacgtgatcacccgcacgattaacctgccgacctatacgctggaagcggtttacgaagccattttcggtaaaccgaaagaaaaagtctatgccgacgaaatcgcagaagcttgggaaagtggcgaaaatctggaacgcgtggcaaaatattccatggaagatgcgaaagccacctacgaactgggtcgtgaatttctgccgatggaaattcagctgtcacgcctggtgggtcaaccgctgtgggacgtttcgcgtagttccaccggcaatctggttgaatggttcctgctgcgtaaagcgtatgaacgcaacgaactggcgccgaataaaccggatgaacgcgaatatgaacgtcgcctgcgtgaaagttatgaaggcggttacgttaaagaaccggaacgcggcctgtgggaaggtattgtgtcactggattttcgtagtctgtacccgtccattatcattacccataacgtttcgccggatacgctgaataaagaaggctgcggtgaatatgacgaagccccggaagtgggtcaccgcttctgtaaagattttccgggcttcattccgtcactgctgggttcgctgctggaagaacgccagaagatcaagaaacgtatgaaggaatctaaggatccggtggaacgcaaactgctggactatcgtcaacgcgcgatcaagattctggccaacagcttttatggctattacggttacgcgaaagcccgttggtactgcaaggaatgtgcagaaagcgtgaccgcttggggccgccagtatattgaactggtccgtcgcgaactggaagaacgtggttttaaagtgctgtatatcgataccgacggcctgtacgccacgattccgggtgaaaagaactgggaagaaatcaagcgtcgcgcactggaatttgttaactacatcaattccaaactgccgggcattctggaactggaatatgaaggcttctacacccgtggctttttcgtgacgaagaaaaagtatgcgctgatcgatgaagaaggcaaaattgtcacccgtggtctggaaatcgtgcgtcgcgattggagtgaaattgccaaagaaacccaggcaaaggttctggaagcaattctgaaacatggtaacgtcgaagaagcggtcaagatcgtgaaagaagttaccgaaaaactgtcgaattatgaaattccggtcgaaaagctggtgatctacgaacaaattacgcgcccgctgaacgaatataaagccattggcccgcacgtggcagttgctaaacgtctggcggccaagggtatcaagattaaaccgggcatggtgattggttatgttgtcctgcgcggcgatggtccgatcagcaaacgtgcgatcgccatcgaagaattcgatggcaaaaagcataagtacgacgcagaatactacatcgaaaatcaggttctgccggccgtcgaacgtatcctgaaagcattcggttataagcgtgaagatctgcgctggcagaagaccaaacaagtgggcctgggtgcgtggctgaaagttaaaaagtcttaa

SEQ ID NO: 459 - DNA, 2331 bp, Artificial Sequence
  Synthetic
atgatcctggacgtggactacattaccgaagacggcaaaccgattatccgcatcttcaaaaaagaaaacggcaaattcaaagtggaatatgatcgtaactttcgcccgtatatttacgctctgctgaaagatgacagccagatcgaagaagtccgcaaaattacggcggaacgtcatggtaaaatcgtgcgcatcatcgatgtggaaaaagttgagaaaaaatttctgggccgtccgattaccgtgtggcgcctgtatttcgaacatccgcaagatgttccggctatccgtgacaaagttcgcgaacacagtgcggtcatcgatatttttgaatatgacattccgttcgctaaacgctacctgatcgataaaggtctgattccgatggaaggcgacgaagaactgaaactgctggcctttgatattgaaacgctgtaccacgaaggtgaagaattcggtaaaggcccgattatcatgatctcctatgcagacgaagaagaagcgaaagtcatcacctggaagaaaattgatctgccgtatgtggaagtggttagctctgaacgtgaaatgatcaaacgctttctgaaaatcatccgcgaaaaagatccggacgttattatcacctataacggtgattcattcgacctgccgtacctggtgaaacgtgccgaaaaactgggcatcaaactgacgattggtcgtgacggctcggaaccgaaaatgcagcgcctgggtgatatgaccgcagtcgaaatcaaaggccgtattcattttgatctgtaccacgtgatcacccgcacgattaacctgccgacctatacgctggaagcggtttacgaagccattttcggtaaaccgaaagaaaaagtctatgccgacgaaatcgcagaagcttgggaaagtggcgaaaatctggaacgcgtggcaaaatattccatggaagatgcgaaagccacctacgaactgggtcgtgaatttctgccgatggaaattcagctgtcacgcctggtgggtcaaccgctgtgggacgtttcgcgtagttccaccggcaatctggttgaatggttcctgctgcgtaaagcgtatgaacgcaacgaactggcgccgaataaaccggatgaacgcgaatatgaacgtcgcctgcgtgaaagttatgaaggcggttacgttaaagaaccggaacgcggcctgtgggaaggtattgtgtcactggattttcgtagtctgtacccgtccattatcattacccataacgtttcgccggatacgctgaataaagaaggctgcggtgaatatgacgaagccccggaagtgggtcaccgcttctgtaaagattttccgggcttcattccgtcactgctgggttcgctgctggaagaacgccagaagatcaagaaacgtatgaaggaatctaaggatccggtggaacgcaaactgctggactatcgtcaacgcgcgatcaagattctggccaacagcttttatggctattacggttacgcgaaagcccgttggtactgcaaggaatgtgcagaaagcgtgaccgcttggggccgccagtatattgaactggtccgtcgcgaactggaagaacgtggttttaaagtgctgtatatcgataccgacggcctgtacgccacgattccgggtgaaaagaactgggaagaaatcaagcgtcgcgcactggaatttgttaactacatcaattccaaactgccgggcattctggaactggaatatgaaggcttctacacccgtggctttttcgtgacgaagaaaaagtatgcgctgatcgatgaagaaggcaaaattgtcacccgtggtctggaaatcgtgcgtcgcgattggagtgaaattgccaaagaaacccaggcacgtgttctggaagcactgctgaaagatggtaatgtcgaagaagcagtgagtattgttaaagaagtcacggaaaaactgtccaagtatgaagtcccgccggaaaaactggtgattcatgaacaaatcacccgcgaactgaaagattacaaggcgacgggcccgcacgtggcaattgctaaacgtctggcagcgcgtggcgttaagatccgtccgggtaccgttattagctatatcgtcctgaaaggctctggtcgtattggtgaccgcgccatcccgtttgatgaattcgacccggctaaacaccgctacgatgcggaatattacattgaaaatcaggtcctgccggctgtggaacgtatcctgaaagcgtttggctatcgtaaggaagatctgcgctaccagaaaacccgtcaagtgggcctgggtgcgtggctgaaaccgaagggtaaaaagtaa

SEQ ID NO: 460 - DNA, 2331 bp, Artificial Sequence
  Synthetic
atgatcctggacgtggactacattaccgaagacggcaaaccgattatccgcatcttcaaaaaagaaaacggcaaattcaaagtggaatatgatcgtaactttcgcccgtatatttacgctctgctgaaagatgacagccagatcgaagaagtccgcaaaattacggcggaacgtcatggtaaaatcgtgcgcatcatcgatgtggaaaaagttgagaaaaaatttctgggccgtccgattaccgtgtggcgcctgtatttcgaacatccgcaagatgttccggctatccgtgacaaagttcgcgaacacagtgcggtcatcgatatttttgaatatgacattccgttcgctaaacgctacctgatcgataaaggtctgattccgatggaaggcgacgaagaactgaaactgctggcctttgatattgaaacgctgtaccacgaaggtgaagaattcggtaaaggcccgattatcatgatctcctatgcagacgaagaagaagcgaaagtcatcacctggaagaaaattgatctgccgtatgtggaagtggttagctctgaacgtgaaatgatcaaacgctttctgaaaatcatccgcgaaaaagatccggacgttattatcacctataacggtgattcattcgacctgccgtacctggtgaaacgtgccgaaaaactgggcatcaaactgacgattggtcgtgacggctcggaaccgaaaatgcagcgcctgggtgatatgaccgcagtcgaaatcaaaggccgtattcattttgatctgtaccacgtgatcacccgcacgattaacctgccgacctatacgctggaagcggtttacgaagccattttcggtaaaccgaaagaaaaagtctatgccgacgaaatcgcagaagcttgggaaagtggcgaaaatctggaacgcgtggcaaaatattccatggaagatgcgaaagccacctacgaactgggtcgtgaatttctgccgatggaaattcagctgtcacgcctggtgggtcaaccgctgtgggacgtttcgcgtagttccaccggcaatctggttgaatggttcctgctgcgtaaagcgtatgaacgcaacgaactggcgccgaataaaccggatgaacgcgaatatgaacgtcgcctgcgtgaaagttatgaaggcggttacgttaaagaaccggaacgcggcctgtgggaaggtattgtgtcactggattttcgtagtctgtacccgtccattatcattacccataacgtttcgccggatacgctgaataaagaaggctgcggtgaatatgacgaagccccggaagtgggtcaccgcttctgtaaagattttccgggcttcattccgtcactgctgggttcgctgctggaagaacgccagaagatcaagaaacgtatgaaggaatctaaggatccggtggaacgcaaactgctggactatcgtcaacgcgcgatcaagattctggccaacagcttttatggctattacggttacgcgaaagcccgttggtactgcaaggaatgtgcagaaagcgtgaccgcttggggccgccagtatattgaactggtccgtcgcgaactggaagaacgtggttttaaagtgctgtatatcgataccgacggcctgtacgccacgattccgggtgaaaagaactgggaagaaatcaagcgtcgcgcactggaatttgttaactacatcaattccaaactgccgggcattctggaactggaatatgaaggcttctacacccgtggctttttcgtgacgaagaaaaagtatgcgctgatcgatgaagaaggcaaaattgtcacccgtggtctggaaatcgtgcgtcgcgattggagtgaaattgccaaagaaacccaggcacgcgtcctggaagcaatcctgaaagatggtgacgtggaagaagccgtccgtattgtgaaagaagttacggaaaaactgtccaaatatgaagttccgccggaaaaactggtcatccatgaacaaattacccgcgaactgaaagattacaaagcgacgggcccgcacgtcgcaatcgctaaacgtctggcggcgcgtggcgtgaaaattcgtccgggtaccgtgatctcatatattgttctgaaaggctcgggtcgtatcggtgaccgcgctattccgtttgatgaattcgacccgaaaaaacacaaatacgatgcggaatactacatcgaaaaccaggttctgccggccgtcgaacgtattctgcgcgcatttggctaccgtaaagaagatctgcgttatcaaaaaaccaaacaagtgggtctgggtgcgtggctgaaaccgaaaggtaaaaaataa

SEQ ID NO: 461 - DNA, 2328 bp, Artificial Sequence
  Synthetic
atgatcctggacgtggactacattaccgaagacggcaaaccgattatccgcatcttcaaaaaagaaaacggcaaattcaaagtggaatatgatcgtaactttcgcccgtatatttacgctctgctgaaagatgacagccagatcgaagaagtccgcaaaattacggcggaacgtcatggtaaaatcgtgcgcatcatcgatgtggaaaaagttgagaaaaaatttctgggccgtccgattaccgtgtggcgcctgtatttcgaacatccgcaagatgttccggctatccgtgacaaagttcgcgaacacagtgcggtcatcgatatttttgaatatgacattccgttcgctaaacgctacctgatcgataaaggtctgattccgatggaaggcgacgaagaactgaaactgctggcctttgatattgaaacgctgtaccacgaaggtgaagaattcggtaaaggcccgattatcatgatctcctatgcagacgaagaagaagcgaaagtcatcacctggaagaaaattgatctgccgtatgtggaagtggttagctctgaacgtgaaatgatcaaacgctttctgaaaatcatccgcgaaaaagatccggacgttattatcacctataacggtgattcattcgacctgccgtacctggtgaaacgtgccgaaaaactgggcatcaaactgacgattggtcgtgacggctcggaaccgaaaatgcagcgcctgggtgatatgaccgcagtcgaaatcaaaggccgtattcattttgatctgtaccacgtgatcacccgcacgattaacctgccgacctatacgctggaagcggtttacgaagccattttcggtaaaccgaaagaaaaagtctatgccgacgaaatcgcagaagcttgggaaagtggcgaaaatctggaacgcgtggcaaaatattccatggaagatgcgaaagccacctacgaactgggtcgtgaatttctgccgatggaaattcagctgtcacgcctggtgggtcaaccgctgtgggacgtttcgcgtagttccaccggcaatctggttgaatggttcctgctgcgtaaagcgtatgaacgcaacgaactggcgccgaataaaccggatgaacgcgaatatgaacgtcgcctgcgtgaaagttatgaaggcggttacgttaaagaaccggaacgcggcctgtgggaaggtattgtgtcactggattttcgtagtctgtacccgtccattatcattacccataacgtttcgccggatacgctgaataaagaaggctgcggtgaatatgacgaagccccggaagtgggtcaccgcttctgtaaagattttccgggcttcattccgtcactgctgggttcgctgctggaagaacgccagaagatcaagaaacgtatgaaggaatctaaggatccggtggaacgcaaactgctggactatcgtcaacgcgcgatcaagattctggccaacagcttttatggctattacggttacgcgaaagcccgttggtactgcaaggaatgtgcagaaagcgtgaccgcttggggccgccagtatattgaactggtccgtcgcgaactggaagaacgtggttttaaagtgctgtatatcgataccgacggcctgtacgccacgattccgggtgaaaagaactgggaagaaatcaagcgtcgcgcactggaatttgttaactacatcaattccaaactgccgggcattctggaactggaatatgaaggcttctacacccgtggctttttcgtgacgaagaaaaagtatgcgctgatcgatgaagaaggcaaaattgtcacccgtggtctggaaatcgtgcgtcgcgattggagtgaaattgccaaagaaacccaggcacgtgttctggaagcaattctgaaacatggtaacgtcgaagaagcggtcaaaatcgtgaaagaagttacggaaaaactgtctaactacgaaattccgccggaaaaactggccatctacgaacaaattacccgcccgctgcatgaatataaagcaatcggtccgcacgtcgcagtggcaaaacgtctggcagcacgcggcgttaaagtcaaaccgggtatggtcatcggctatattgtgctgcgtggtgatggcccgatcagcaaccgcgcaattctggctgaagaatacgatctgaaaaaacacaaatacgacgccgaatattacatcgaaaatcaggttctgccggctgtcctgcgtattctggaagcgtttggctatcgtaaagaagatctgcgctggcagaaaacccgtcaaacgggtctgacctcatggctgaatattaaaaaatcgtaa

SEQ ID NO: 462 - DNA, 2328 bp, Artificial Sequence
  Synthetic
atgatcctggacgtggactacattaccgaagacggcaaaccgattatccgcatcttcaaaaaagaaaacggcaaattcaaagtggaatatgatcgtaactttcgcccgtatatttacgctctgctgaaagatgacagccagatcgaagaagtccgcaaaattacggcggaacgtcatggtaaaatcgtgcgcatcatcgatgtggaaaaagttgagaaaaaatttctgggccgtccgattaccgtgtggcgcctgtatttcgaacatccgcaagatgttccggctatccgtgacaaagttcgcgaacacagtgcggtcatcgatatttttgaatatgacattccgttcgctaaacgctacctgatcgataaaggtctgattccgatggaaggcgacgaagaactgaaactgctggcctttgatattgaaacgctgtaccacgaaggtgaagaattcggtaaaggcccgattatcatgatctcctatgcagacgaagaagaagcgaaagtcatcacctggaagaaaattgatctgccgtatgtggaagtggttagctctgaacgtgaaatgatcaaacgctttctgaaaatcatccgcgaaaaagatccggacgttattatcacctataacggtgattcattcgacctgccgtacctggtgaaacgtgccgaaaaactgggcatcaaactgacgattggtcgtgacggctcggaaccgaaaatgcagcgcctgggtgatatgaccgcagtcgaaatcaaaggccgtattcattttgatctgtaccacgtgatcacccgcacgattaacctgccgacctatacgctggaagcggtttacgaagccattttcggtaaaccgaaagaaaaagtctatgccgacgaaatcgcagaagcttgggaaagtggcgaaaatctggaacgcgtggcaaaatattccatggaagatgcgaaagccacctacgaactgggtcgtgaatttctgccgatggaaattcagctgtcacgcctggtgggtcaaccgctgtgggacgtttcgcgtagttccaccggcaatctggttgaatggttcctgctgcgtaaagcgtatgaacgcaacgaactggcgccgaataaaccggatgaacgcgaatatgaacgtcgcctgcgtgaaagttatgaaggcggttacgttaaagaaccggaacgcggcctgtgggaaggtattgtgtcactggattttcgtagtctgtacccgtccattatcattacccataacgtttcgccggatacgctgaataaagaaggctgcggtgaatatgacgaagccccggaagtgggtcaccgcttctgtaaagattttccgggcttcattccgtcactgctgggttcgctgctggaagaacgccagaagatcaagaaacgtatgaaggaatctaaggatccggtggaacgcaaactgctggactatcgtcaacgcgcgatcaagattctggccaacagcttttatggctattacggttacgcgaaagcccgttggtactgcaaggaatgtgcagaaagcgtgaccgcttggggccgccagtatattgaactggtccgtcgcgaactggaagaacgtggttttaaagtgctgtatatcgataccgacggcctgtacgccacgattccgggtgaaaagaactgggaagaaatcaagcgtcgcgcactggaatttgttaactacatcaattccaaactgccgggcattctggaactggaatatgaaggcttctacacccgtggctttttcgtgacgaagaaaaagtatgcgctgatcgatgaagaaggcaaaattgtcacccgtggtctggaaatcgtgcgtcgcgattggagtgaaattgccaaagaaacccaggcaaaagttctggaagcaatcctgaaacatggtaatgtcgaagaagcagtgaaaattgtcaaggaagtgacggaaaaactgtcgaagtatgaaatcccgccggaaaaactggtgatctacgaacaaattacccgcccgctgcatgaatataaagcgattggcccgcacgtggcagttgctaaacgtctggcagcccgcggtgtcaaagtgcgtccgggcatggtgatcggttatattgttctgcgtggcgatggtccgatcagtaaacgcgcgattctggccgaagaatttgatccgcgcaaacacaagtacgacgccgaatattacatcgaaaaccaggtgctgccggctgttctgcgtattctggaagcgttcggctatcgtaaagaagatctgcgctggcagaaaaccaagcaaacgggtctgaccgcatggctgaatgtgaaaaagaaataa

SEQ ID NO: 463 - DNA, 2328 bp, Artificial Sequence
  Synthetic
atgatcctggacgtggactacattaccgaagacggcaaaccgattatccgcatcttcaaaaaagaaaacggcaaattcaaagtggaatatgatcgtaactttcgcccgtatatttacgctctgctgaaagatgacagccagatcgaagaagtccgcaaaattacggcggaacgtcatggtaaaatcgtgcgcatcatcgatgtggaaaaagttgagaaaaaatttctgggccgtccgattaccgtgtggcgcctgtatttcgaacatccgcaagatgttccggctatccgtgacaaagttcgcgaacacagtgcggtcatcgatatttttgaatatgacattccgttcgctaaacgctacctgatcgataaaggtctgattccgatggaaggcgacgaagaactgaaactgctggcctttgatattgaaacgctgtaccacgaaggtgaagaattcggtaaaggcccgattatcatgatctcctatgcagacgaagaagaagcgaaagtcatcacctggaagaaaattgatctgccgtatgtggaagtggttagctctgaacgtgaaatgatcaaacgctttctgaaaatcatccgcgaaaaagatccggacgttattatcacctataacggtgattcattcgacctgccgtacctggtgaaacgtgccgaaaaactgggcatcaaactgacgattggtcgtgacggctcggaaccgaaaatgcagcgcctgggtgatatgaccgcagtcgaaatcaaaggccgtattcattttgatctgtaccacgtgatcacccgcacgattaacctgccgacctatacgctggaagcggtttacgaagccattttcggtaaaccgaaagaaaaagtctatgccgacgaaatcgcagaagcttgggaaagtggcgaaaatctggaacgcgtggcaaaatattccatggaagatgcgaaagccacctacgaactgggtcgtgaatttctgccgatggaaattcagctgtcacgcctggtgggtcaaccgctgtgggacgtttcgcgtagttccaccggcaatctggttgaatggttcctgctgcgtaaagcgtatgaacgcaacgaactggcgccgaataaaccgtcgggccgcgaatacgatgaacgtcgcgaaggttatgcgggcggttacgttaaagaaccggaacgtggtctgtgggaaaacatcgtgtacctggattacaaaagtctgtatccgtccattatcattacccataacgtgagcccggacacgctgaatcgcgaaggctgcaaagaatacgatgtcgccccgcaagtgggtcacaaattttgtaaagactttccgggcttcattccgtctctgctgggtgatctgctggaagaacgtcagaaaattaaaaagaaaatgaaagcaaccaaagatccgattgagaaaaaactgctggactatcgtcaacgcgcgatcaaaattctggccaacagttattacggctattacggttatgcgaaagcccgctggtactgcaaagaatgtgcagaatccgttacggcttggggccgtgaatatatcgaaaccacgatccgcgaaatcgaagaaaaatacggtttcaaagtgctgtacgccgataccgacggcttccatgcaacgatcccgggtgaagatgctgaagaaattaagaaaaaagcgaaagaattcctgaaatacatcaacagcaaactgccgggcgccctggaactggaatatgaaggcttctaccgtcgcggctttttcgtgaccaagaaaaaatacgcagttatcgacgaagaaggcaaaattaccacgcgtggtctggaaatcgtgcgtcgcgattggagtgaaattgccaaagaaacccaggcacgcgttctggaagcaatcctgcgtcatggtgacgtcgaagaagccgttcgcattgtcaaagatgtgacggaaaagctgtcgaaatatgaagtcccgccggaaaaactggtgatccatgaacaaattacccgtgaactgaaggattacaaagcgacgggcccgcacgttgcaattgctaaacgcctggcagcccgtggcatcaagattcgtccgggtaccgttatcagctatattgtcctgaaaggctctggtcgcatcggtgatcgtgctattccgtttgatgaattcgacccgacgaaacaccgttacgatgccgaatattacatcgaaaatcaggtgctgccggccgttgaacgcattctgaaagcatttggctataagaaagaagaactgcgctaccagaaaacccgtcaagtgggcctgggtgcgtggctgaagctgaaaggtaagaaataa

SEQ ID NO: 464 - DNA, 2322 bp, Artificial Sequence
  Synthetic
atgatcctggacgtggactacattaccgaagacggcaaaccgattatccgcatcttcaaaaaagaaaacggcaaattcaaagtggaatatgatcgtaactttcgcccgtatatttacgctctgctgaaagatgacagccagatcgaagaagtccgcaaaattacggcggaacgtcatggtaaaatcgtgcgcatcatcgatgtggaaaaagttgagaaaaaatttctgggccgtccgattaccgtgtggcgcctgtatttcgaacatccgcaagatgttccggctatccgtgacaaagttcgcgaacacagtgcggtcatcgatatttttgaatatgacattccgttcgctaaacgctacctgatcgataaaggtctgattccgatggaaggcgacgaagaactgaaactgctggcctttgatattgaaacgctgtaccacgaaggtgaagaattcggtaaaggcccgattatcatgatctcctatgcagacgaagaagaagcgaaagtcatcacctggaagaaaattgatctgccgtatgtggaagtggttagctctgaacgtgaaatgatcaaacgctttctgaaaatcatccgcgaaaaagatccggacgttattatcacctataacggtgattcattcgacctgccgtacctggtgaaacgtgccgaaaaactgggcatcaaactgacgattggtcgtgacggctcggaaccgaaaatgcagcgcctgggtgatatgaccgcagtcgaaatcaaaggccgtattcattttgatctgtaccacgtgatcacccgcacgattaacctgccgacctatacgctggaagcggtttacgaagccattttcggtaaaccgaaagaaaaagtctatgccgacgaaatcgcagaagcttgggaaagtggcgaaaatctggaacgcgtggcaaaatattccatggaagatgcgaaagccacctacgaactgggtcgtgaatttctgccgatggaaattcagctgtcacgcctggtgggtcaaccgctgtgggacgtttcgcgtagttccaccggcaatctggttgaatggttcctgctgcgtaaagcgtatgaacgcaacgaactggcgccgaataaaccgtcgggccgcgaatacgatgaacgtcgcgaaggttatgcgggcggttacgttaaagaaccggaacgtggtctgtgggaaaacatcgtgtacctggattacaaaagtctgtatccgtccattatcattacccataacgtgagcccggacacgctgaatcgcgaaggctgcaaagaatacgatgtcgccccgcaagtgggtcacaaattttgtaaagactttccgggcttcattccgtctctgctgggtgatctgctggaagaacgtcagaaaattaaaaagaaaatgaaagcaaccaaagatccgattgagaaaaaactgctggactatcgtcaacgcgcgatcaaaattctggccaacagttattacggctattacggttatgcgaaagcccgctggtactgcaaagaatgtgcagaatccgttacggcttggggccgtgaatatatcgaaaccacgatccgcgaaatcgaagaaaaatacggtttcaaagtgctgtacgccgataccgacggcttccatgcaacgatcccgggtgaagatgctgaagaaattaagaaaaaagcgaaagaattcctgaaatacatcaacagcaaactgccgggcgccctggaactggaatatgaaggcttctaccgtcgcggctttttcgtgaccaagaaaaaatacgcagttatcgacgaagaaggcaaaattaccacgcgtggtctggaaatcgtgcgtcgcgattggagtgaaattgccaaagaaacccaggcacgtgtcctggaagcaatcctgaaacatggtgatgtggaagaagcggttcgcattgtcaaagaagtgacggaaaagctgtcgaaatatgaagttccgccggaaaaactggtcatccatgaacaaattacccgcgatctgcgtgactacaaagccacgggtccgcacgtggcagttgcaaaacgtctggcagcccgtggcgtgaagattcgtccgggtaccgtgatcagttatattgttctgaaaggctccggtcgcatcggtgaccgtgctattccgtttgatgaattcgacccgacgaaacaccgttacgatgccgaatattacatcgaaaatcaggtcctgccggccgtggaacgcattctgaaagcatttggttatcgcaaggaagatctgcgttaccagaagaccaaacaagtcggcctgggtgcgtggctgaaagtgaaaaagtaa

SEQ ID NO: 465 - DNA, 2328 bp, Artificial Sequence
  Synthetic
atgatcctggacgtggactacattaccgaagacggcaaaccgattatccgcatcttcaaaaaagaaaacggcaaattcaaagtggaatatgatcgtaactttcgcccgtatatttacgctctgctgaaagatgacagccagatcgaagaagtccgcaaaattacggcggaacgtcatggtaaaatcgtgcgcatcatcgatgtggaaaaagttgagaaaaaatttctgggccgtccgattaccgtgtggcgcctgtatttcgaacatccgcaagatgttccggctatccgtgacaaagttcgcgaacacagtgcggtcatcgatatttttgaatatgacattccgttcgctaaacgctacctgatcgataaaggtctgattccgatggaaggcgacgaagaactgaaactgctggcctttgatattgaaacgctgtaccacgaaggtgaagaattcggtaaaggcccgattatcatgatctcctatgcagacgaagaagaagcgaaagtcatcacctggaagaaaattgatctgccgtatgtggaagtggttagctctgaacgtgaaatgatcaaacgctttctgaaaatcatccgcgaaaaagatccggacgttattatcacctataacggtgattcattcgacctgccgtacctggtgaaacgtgccgaaaaactgggcatcaaactgacgattggtcgtgacggctcggaaccgaaaatgcagcgcctgggtgatatgaccgcagtcgaaatcaaaggccgtattcattttgatctgtaccacgtgatcacccgcacgattaacctgccgacctatacgctggaagcggtttacgaagccattttcggtaaaccgaaagaaaaagtctatgccgacgaaatcgcagaagcttgggaaagtggcgaaaatctggaacgcgtggcaaaatattccatggaagatgcgaaagccacctacgaactgggtcgtgaatttctgccgatggaaattcagctgtcacgcctggtgggtcaaccgctgtgggacgtttcgcgtagttccaccggcaatctggttgaatggttcctgctgcgtaaagcgtatgaacgcaacgaactggcgccgaataaaccgtcgggccgcgaatacgatgaacgtcgcgaaggttatgcgggcggttacgttaaagaaccggaacgtggtctgtgggaaaacatcgtgtacctggattacaaaagtctgtatccgtccattatcattacccataacgtgagcccggacacgctgaatcgcgaaggctgcaaagaatacgatgtcgccccgcaagtgggtcacaaattttgtaaagactttccgggcttcattccgtctctgctgggtgatctgctggaagaacgtcagaaaattaaaaagaaaatgaaagcaaccaaagatccgattgagaaaaaactgctggactatcgtcaacgcgcgatcaaaattctggccaacagttattacggctattacggttatgcgaaagcccgctggtactgcaaagaatgtgcagaatccgttacggcttggggccgtgaatatatcgaaaccacgatccgcgaaatcgaagaaaaatacggtttcaaagtgctgtacgccgataccgacggcttccatgcaacgatcccgggtgaagatgctgaagaaattaagaaaaaagcgaaagaattcctgaaatacatcaacagcaaactgccgggcgccctggaactggaatatgaaggcttctaccgtcgcggctttttcgtgaccaagaaaaaatacgcagttatcgacgaagaaggcaaaattaccacgcgtggtctggaaatcgtgcgtcgcgattggagtgaaattgccaaagaaacccaggcacgtgtgctggaagctctgctgaaagatggcaatgttgaagaagcggtttccattgtcaaagaagtgacggaaaagctgggtaaatatgaagtcccgccggaaaaactggtgatccatgaacaaattacccgcgaactgaaggattacaaagcgacgggcccgcacgttgctatcgcgaaacgtctggcagcgcgtggcgtgaagattcgtccgggtaccgttatcagctatattgtcctgaaaggctctggtcgtatcggtgaccgcgcgattccgtttgatgaattcgacccgacgaaacatcgctacgatgcagaatattacatcgaaaaccaggttctgccggctgtcgaacgtattctgaaagcgtttggctatcgtgccgaagatctgcgctaccagaaaacccgtcaagtgggcctgggtgtttggctgcaaccgaaaggtaagaaataa

SEQ ID NO: 466 - DNA, 2325 bp, Artificial Sequence
  Synthetic
atgatcctggacgtggactacattaccgaagacggcaaaccgattatccgcatcttcaaaaaagaaaacggcaaattcaaagtggaatatgatcgtaactttcgcccgtatatttacgctctgctgaaagatgacagccagatcgaagaagtccgcaaaattacggcggaacgtcatggtaaaatcgtgcgcatcatcgatgtggaaaaagttgagaaaaaatttctgggccgtccgattaccgtgtggcgcctgtatttcgaacatccgcaagatgttccggctatccgtgacaaagttcgcgaacacagtgcggtcatcgatatttttgaatatgacattccgttcgctaaacgctacctgatcgataaaggtctgattccgatggaaggcgacgaagaactgaaactgctggcctttgatattgaaacgctgtaccacgaaggtgaagaattcggtaaaggcccgattatcatgatctcctatgcagacgaagaagaagcgaaagtcatcacctggaagaaaattgatctgccgtatgtggaagtggttagctctgaacgtgaaatgatcaaacgctttctgaaaatcatccgcgaaaaagatccggacgttattatcacctataacggtgattcattcgacctgccgtacctggtgaaacgtgccgaaaaactgggcatcaaactgacgattggtcgtgacggctcggaaccgaaaatgcagcgcctgggtgatatgaccgcagtcgaaatcaaaggccgtattcattttgatctgtaccacgtgatcacccgcacgattaacctgccgacctatacgctggaagcggtttacgaagccattttcggtaaaccgaaagaaaaagtctatgccgacgaaatcgcagaagcttgggaaagtggcgaaaatctggaacgcgtggcaaaatattccatggaagatgcgaaagccacctacgaactgggtcgtgaatttctgccgatggaaattcagctgtcacgcctggtgggtcaaccgctgtgggacgtttcgcgtagttccaccggcaatctggttgaatggttcctgctgcgtaaagcgtatgaacgcaacgaactggcgccgaataaaccgtcgggccgcgaatacgatgaacgtcgcgaaggttatgcgggcggttacgttaaagaaccggaacgtggtctgtgggaaaacatcgtgtacctggattacaaaagtctgtatccgtccattatcattacccataacgtgagcccggacacgctgaatcgcgaaggctgcaaagaatacgatgtcgccccgcaagtgggtcacaaattttgtaaagactttccgggcttcattccgtctctgctgggtgatctgctggaagaacgtcagaaaattaaaaagaaaatgaaagcaaccaaagatccgattgagaaaaaactgctggactatcgtcaacgcgcgatcaaaattctggccaacagttattacggctattacggttatgcgaaagcccgctggtactgcaaagaatgtgcagaatccgttacggcttggggccgtgaatatatcgaaaccacgatccgcgaaatcgaagaaaaatacggtttcaaagtgctgtacgccgataccgacggcttccatgcaacgatcccgggtgaagatgctgaagaaattaagaaaaaagcgaaagaattcctgaaatacatcaacagcaaactgccgggcgccctggaactggaatatgaaggcttctaccgtcgcggctttttcgtgaccaagaaaaaatacgcagttatcgacgaagaaggcaaaattaccacgcgtggtctggaaatcgtgcgtcgcgattggagtgaaattgccaaagaaacccaggcaaaggttctggaagcaattctgaaacatggtaacgtcgaagaagcggtcaagatcgtgaaagaagttaccgaaaaactgtcgaattatgaaattccggtcgaaaagctggtgatctacgaacaaattacgcgcccgctgaacgaatataaagccattggcccgcacgtggcagttgctaaacgtctggcggccaagggtatcaagattaaaccgggcatggtgattggttatgttgtcctgcgcggcgatggtccgatcagcaaacgtgcgatcgccatcgaagaattcgatggcaaaaagcataagtacgacgcagaatactacatcgaaaatcaggttctgccggccgtcgaacgtatcctgaaagcattcggttataagcgtgaagatctgcgctggcagaagaccaaacaagtgggcctgggtgcgtggctgaaagttaaaaagtcttaa

SEQ ID NO: 467 - DNA, 2328 bp, Artificial Sequence
  Synthetic
atgatcctggacgtggactacattaccgaagacggcaaaccgattatccgcatcttcaaaaaagaaaacggcaaattcaaagtggaatatgatcgtaactttcgcccgtatatttacgctctgctgaaagatgacagccagatcgaagaagtccgcaaaattacggcggaacgtcatggtaaaatcgtgcgcatcatcgatgtggaaaaagttgagaaaaaatttctgggccgtccgattaccgtgtggcgcctgtatttcgaacatccgcaagatgttccggctatccgtgacaaagttcgcgaacacagtgcggtcatcgatatttttgaatatgacattccgttcgctaaacgctacctgatcgataaaggtctgattccgatggaaggcgacgaagaactgaaactgctggcctttgatattgaaacgctgtaccacgaaggtgaagaattcggtaaaggcccgattatcatgatctcctatgcagacgaagaagaagcgaaagtcatcacctggaagaaaattgatctgccgtatgtggaagtggttagctctgaacgtgaaatgatcaaacgctttctgaaaatcatccgcgaaaaagatccggacgttattatcacctataacggtgattcattcgacctgccgtacctggtgaaacgtgccgaaaaactgggcatcaaactgacgattggtcgtgacggctcggaaccgaaaatgcagcgcctgggtgatatgaccgcagtcgaaatcaaaggccgtattcattttgatctgtaccacgtgatcacccgcacgattaacctgccgacctatacgctggaagcggtttacgaagccattttcggtaaaccgaaagaaaaagtctatgccgacgaaatcgcagaagcttgggaaagtggcgaaaatctggaacgcgtggcaaaatattccatggaagatgcgaaagccacctacgaactgggtcgtgaatttctgccgatggaaattcagctgtcacgcctggtgggtcaaccgctgtgggacgtttcgcgtagttccaccggcaatctggttgaatggttcctgctgcgtaaagcgtatgaacgcaacgaactggcgccgaataaaccgtcgggccgcgaatacgatgaacgtcgcgaaggttatgcgggcggttacgttaaagaaccggaacgtggtctgtgggaaaacatcgtgtacctggattacaaaagtctgtatccgtccattatcattacccataacgtgagcccggacacgctgaatcgcgaaggctgcaaagaatacgatgtcgccccgcaagtgggtcacaaattttgtaaagactttccgggcttcattccgtctctgctgggtgatctgctggaagaacgtcagaaaattaaaaagaaaatgaaagcaaccaaagatccgattgagaaaaaactgctggactatcgtcaacgcgcgatcaaaattctggccaacagttattacggctattacggttatgcgaaagcccgctggtactgcaaagaatgtgcagaatccgttacggcttggggccgtgaatatatcgaaaccacgatccgcgaaatcgaagaaaaatacggtttcaaagtgctgtacgccgataccgacggcttccatgcaacgatcccgggtgaagatgctgaagaaattaagaaaaaagcgaaagaattcctgaaatacatcaacagcaaactgccgggcgccctggaactggaatatgaaggcttctaccgtcgcggctttttcgtgaccaagaaaaaatacgcagttatcgacgaagaaggcaaaattaccacgcgtggtctggaaatcgtgcgtcgcgattggagtgaaattgccaaagaaacccaggcacgtgttctggaagcactgctgaaagatggtaatgtcgaagaagcagtgagtattgttaaagaagtcacggaaaaactgtccaagtatgaagtcccgccggaaaaactggtgattcatgaacaaatcacccgcgaactgaaagattacaaggcgacgggcccgcacgtggcaattgctaaacgtctggcagcgcgtggcgttaagatccgtccgggtaccgttattagctatatcgtcctgaaaggctctggtcgtattggtgaccgcgccatcccgtttgatgaattcgacccggctaaacaccgctacgatgcggaatattacattgaaaatcaggtcctgccggctgtggaacgtatcctgaaagcgtttggctatcgtaaggaagatctgcgctaccagaaaacccgtcaagtgggcctgggtgcgtggctgaaaccgaagggtaaaaagtaa

SEQ ID NO: 468 - DNA, 2328 bp, Artificial Sequence
  Synthetic
atgatcctggacgtggactacattaccgaagacggcaaaccgattatccgcatcttcaaaaaagaaaacggcaaattcaaagtggaatatgatcgtaactttcgcccgtatatttacgctctgctgaaagatgacagccagatcgaagaagtccgcaaaattacggcggaacgtcatggtaaaatcgtgcgcatcatcgatgtggaaaaagttgagaaaaaatttctgggccgtccgattaccgtgtggcgcctgtatttcgaacatccgcaagatgttccggctatccgtgacaaagttcgcgaacacagtgcggtcatcgatatttttgaatatgacattccgttcgctaaacgctacctgatcgataaaggtctgattccgatggaaggcgacgaagaactgaaactgctggcctttgatattgaaacgctgtaccacgaaggtgaagaattcggtaaaggcccgattatcatgatctcctatgcagacgaagaagaagcgaaagtcatcacctggaagaaaattgatctgccgtatgtggaagtggttagctctgaacgtgaaatgatcaaacgctttctgaaaatcatccgcgaaaaagatccggacgttattatcacctataacggtgattcattcgacctgccgtacctggtgaaacgtgccgaaaaactgggcatcaaactgacgattggtcgtgacggctcggaaccgaaaatgcagcgcctgggtgatatgaccgcagtcgaaatcaaaggccgtattcattttgatctgtaccacgtgatcacccgcacgattaacctgccgacctatacgctggaagcggtttacgaagccattttcggtaaaccgaaagaaaaagtctatgccgacgaaatcgcagaagcttgggaaagtggcgaaaatctggaacgcgtggcaaaatattccatggaagatgcgaaagccacctacgaactgggtcgtgaatttctgccgatggaaattcagctgtcacgcctggtgggtcaaccgctgtgggacgtttcgcgtagttccaccggcaatctggttgaatggttcctgctgcgtaaagcgtatgaacgcaacgaactggcgccgaataaaccgtcgggccgcgaatacgatgaacgtcgcgaaggttatgcgggcggttacgttaaagaaccggaacgtggtctgtgggaaaacatcgtgtacctggattacaaaagtctgtatccgtccattatcattacccataacgtgagcccggacacgctgaatcgcgaaggctgcaaagaatacgatgtcgccccgcaagtgggtcacaaattttgtaaagactttccgggcttcattccgtctctgctgggtgatctgctggaagaacgtcagaaaattaaaaagaaaatgaaagcaaccaaagatccgattgagaaaaaactgctggactatcgtcaacgcgcgatcaaaattctggccaacagttattacggctattacggttatgcgaaagcccgctggtactgcaaagaatgtgcagaatccgttacggcttggggccgtgaatatatcgaaaccacgatccgcgaaatcgaagaaaaatacggtttcaaagtgctgtacgccgataccgacggcttccatgcaacgatcccgggtgaagatgctgaagaaattaagaaaaaagcgaaagaattcctgaaatacatcaacagcaaactgccgggcgccctggaactggaatatgaaggcttctaccgtcgcggctttttcgtgaccaagaaaaaatacgcagttatcgacgaagaaggcaaaattaccacgcgtggtctggaaatcgtgcgtcgcgattggagtgaaattgccaaagaaacccaggcacgcgtcctggaagcaatcctgaaagatggtgacgtggaagaagccgtccgtattgtgaaagaagttacggaaaaactgtccaaatatgaagttccgccggaaaaactggtcatccatgaacaaattacccgcgaactgaaagattacaaagcgacgggcccgcacgtcgcaatcgctaaacgtctggcggcgcgtggcgtgaaaattcgtccgggtaccgtgatctcatatattgttctgaaaggctcgggtcgtatcggtgaccgcgctattccgtttgatgaattcgacccgaaaaaacacaaatacgatgcggaatactacatcgaaaaccaggttctgccggccgtcgaacgtattctgcgcgcatttggctaccgtaaagaagatctgcgttatcaaaaaaccaaacaagtgggtctgggtgcgtggctgaaaccgaaaggtaaaaaataa

SEQ ID NO: 469 - DNA, 2325 bp, Artificial Sequence
  Synthetic
atgatcctggacgtggactacattaccgaagacggcaaaccgattatccgcatcttcaaaaaagaaaacggcaaattcaaagtggaatatgatcgtaactttcgcccgtatatttacgctctgctgaaagatgacagccagatcgaagaagtccgcaaaattacggcggaacgtcatggtaaaatcgtgcgcatcatcgatgtggaaaaagttgagaaaaaatttctgggccgtccgattaccgtgtggcgcctgtatttcgaacatccgcaagatgttccggctatccgtgacaaagttcgcgaacacagtgcggtcatcgatatttttgaatatgacattccgttcgctaaacgctacctgatcgataaaggtctgattccgatggaaggcgacgaagaactgaaactgctggcctttgatattgaaacgctgtaccacgaaggtgaagaattcggtaaaggcccgattatcatgatctcctatgcagacgaagaagaagcgaaagtcatcacctggaagaaaattgatctgccgtatgtggaagtggttagctctgaacgtgaaatgatcaaacgctttctgaaaatcatccgcgaaaaagatccggacgttattatcacctataacggtgattcattcgacctgccgtacctggtgaaacgtgccgaaaaactgggcatcaaactgacgattggtcgtgacggctcggaaccgaaaatgcagcgcctgggtgatatgaccgcagtcgaaatcaaaggccgtattcattttgatctgtaccacgtgatcacccgcacgattaacctgccgacctatacgctggaagcggtttacgaagccattttcggtaaaccgaaagaaaaagtctatgccgacgaaatcgcagaagcttgggaaagtggcgaaaatctggaacgcgtggcaaaatattccatggaagatgcgaaagccacctacgaactgggtcgtgaatttctgccgatggaaattcagctgtcacgcctggtgggtcaaccgctgtgggacgtttcgcgtagttccaccggcaatctggttgaatggttcctgctgcgtaaagcgtatgaacgcaacgaactggcgccgaataaaccgtcgggccgcgaatacgatgaacgtcgcgaaggttatgcgggcggttacgttaaagaaccggaacgtggtctgtgggaaaacatcgtgtacctggattacaaaagtctgtatccgtccattatcattacccataacgtgagcccggacacgctgaatcgcgaaggctgcaaagaatacgatgtcgccccgcaagtgggtcacaaattttgtaaagactttccgggcttcattccgtctctgctgggtgatctgctggaagaacgtcagaaaattaaaaagaaaatgaaagcaaccaaagatccgattgagaaaaaactgctggactatcgtcaacgcgcgatcaaaattctggccaacagttattacggctattacggttatgcgaaagcccgctggtactgcaaagaatgtgcagaatccgttacggcttggggccgtgaatatatcgaaaccacgatccgcgaaatcgaagaaaaatacggtttcaaagtgctgtacgccgataccgacggcttccatgcaacgatcccgggtgaagatgctgaagaaattaagaaaaaagcgaaagaattcctgaaatacatcaacagcaaactgccgggcgccctggaactggaatatgaaggcttctaccgtcgcggctttttcgtgaccaagaaaaaatacgcagttatcgacgaagaaggcaaaattaccacgcgtggtctggaaatcgtgcgtcgcgattggagtgaaattgccaaagaaacccaggcacgtgttctggaagcaattctgaaacatggtaacgtcgaagaagcggtcaaaatcgtgaaagaagttacggaaaaactgtctaactacgaaattccgccggaaaaactggccatctacgaacaaattacccgcccgctgcatgaatataaagcaatcggtccgcacgtcgcagtggcaaaacgtctggcagcacgcggcgttaaagtcaaaccgggtatggtcatcggctatattgtgctgcgtggtgatggcccgatcagcaaccgcgcaattctggctgaagaatacgatctgaaaaaacacaaatacgacgccgaatattacatcgaaaatcaggttctgccggctgtcctgcgtattctggaagcgtttggctatcgtaaagaagatctgcgctggcagaaaacccgtcaaacgggtctgacctcatggctgaatattaaaaaatcgtaa

SEQ ID NO: 470 - DNA, 2325 bp, Artificial Sequence
  Synthetic
atgatcctggacgtggactacattaccgaagacggcaaaccgattatccgcatcttcaaaaaagaaaacggcaaattcaaagtggaatatgatcgtaactttcgcccgtatatttacgctctgctgaaagatgacagccagatcgaagaagtccgcaaaattacggcggaacgtcatggtaaaatcgtgcgcatcatcgatgtggaaaaagttgagaaaaaatttctgggccgtccgattaccgtgtggcgcctgtatttcgaacatccgcaagatgttccggctatccgtgacaaagttcgcgaacacagtgcggtcatcgatatttttgaatatgacattccgttcgctaaacgctacctgatcgataaaggtctgattccgatggaaggcgacgaagaactgaaactgctggcctttgatattgaaacgctgtaccacgaaggtgaagaattcggtaaaggcccgattatcatgatctcctatgcagacgaagaagaagcgaaagtcatcacctggaagaaaattgatctgccgtatgtggaagtggttagctctgaacgtgaaatgatcaaacgctttctgaaaatcatccgcgaaaaagatccggacgttattatcacctataacggtgattcattcgacctgccgtacctggtgaaacgtgccgaaaaactgggcatcaaactgacgattggtcgtgacggctcggaaccgaaaatgcagcgcctgggtgatatgaccgcagtcgaaatcaaaggccgtattcattttgatctgtaccacgtgatcacccgcacgattaacctgccgacctatacgctggaagcggtttacgaagccattttcggtaaaccgaaagaaaaagtctatgccgacgaaatcgcagaagcttgggaaagtggcgaaaatctggaacgcgtggcaaaatattccatggaagatgcgaaagccacctacgaactgggtcgtgaatttctgccgatggaaattcagctgtcacgcctggtgggtcaaccgctgtgggacgtttcgcgtagttccaccggcaatctggttgaatggttcctgctgcgtaaagcgtatgaacgcaacgaactggcgccgaataaaccgtcgggccgcgaatacgatgaacgtcgcgaaggttatgcgggcggttacgttaaagaaccggaacgtggtctgtgggaaaacatcgtgtacctggattacaaaagtctgtatccgtccattatcattacccataacgtgagcccggacacgctgaatcgcgaaggctgcaaagaatacgatgtcgccccgcaagtgggtcacaaattttgtaaagactttccgggcttcattccgtctctgctgggtgatctgctggaagaacgtcagaaaattaaaaagaaaatgaaagcaaccaaagatccgattgagaaaaaactgctggactatcgtcaacgcgcgatcaaaattctggccaacagttattacggctattacggttatgcgaaagcccgctggtactgcaaagaatgtgcagaatccgttacggcttggggccgtgaatatatcgaaaccacgatccgcgaaatcgaagaaaaatacggtttcaaagtgctgtacgccgataccgacggcttccatgcaacgatcccgggtgaagatgctgaagaaattaagaaaaaagcgaaagaattcctgaaatacatcaacagcaaactgccgggcgccctggaactggaatatgaaggcttctaccgtcgcggctttttcgtgaccaagaaaaaatacgcagttatcgacgaagaaggcaaaattaccacgcgtggtctggaaatcgtgcgtcgcgattggagtgaaattgccaaagaaacccaggcaaaagttctggaagcaatcctgaaacatggtaatgtcgaagaagcagtgaaaattgtcaaggaagtgacggaaaaactgtcgaagtatgaaatcccgccggaaaaactggtgatctacgaacaaattacccgcccgctgcatgaatataaagcgattggcccgcacgtggcagttgctaaacgtctggcagcccgcggtgtcaaagtgcgtccgggcatggtgatcggttatattgttctgcgtggcgatggtccgatcagtaaacgcgcgattctggccgaagaatttgatccgcgcaaacacaagtacgacgccgaatattacatcgaaaaccaggtgctgccggctgttctgcgtattctggaagcgttcggctatcgtaaagaagatctgcgctggcagaaaaccaagcaaacgggtctgaccgcatggctgaatgtgaaaaagaaataa

SEQ ID NO: 471 - DNA, 2331 bp, Artificial Sequence
  Synthetic
atgatcctggacgtggactacattaccgaagacggcaaaccgattatccgcatcttcaaaaaagaaaacggcaaattcaaagtggaatatgatcgtaactttcgcccgtatatttacgctctgctgaaagatgacagccagatcgaagaagtccgcaaaattacggcggaacgtcatggtaaaatcgtgcgcatcatcgatgtggaaaaagttgagaaaaaatttctgggccgtccgattaccgtgtggcgcctgtatttcgaacatccgcaagatgttccggctatccgtgacaaagttcgcgaacacagtgcggtcatcgatatttttgaatatgacattccgttcgctaaacgctacctgatcgataaaggtctgattccgatggaaggcgacgaagaactgaaactgctggcctttgatattgaaacgctgtaccacgaaggtgaagaattcggtaaaggcccgattatcatgatctcctatgcagacgaagaagaagcgaaagtcatcacctggaagaaaattgatctgccgtatgtggaagtggttagctctgaacgtgaaatgatcaaacgctttctgaaaatcatccgcgaaaaagatccggacgttattatcacctataacggtgattcattcgacctgccgtacctggtgaaacgtgccgaaaaactgggcatcaaactgacgattggtcgtgacggctcggaaccgaaaatgcagcgcctgggtgatatgaccgcagtcgaaatcaaaggccgtattcattttgatctgtaccacgtgatcacccgcacgattaacctgccgacctatacgctggaagcggtttacgaagccattttcggtaaaccgaaagaaaaagtctatgccgacgaaatcgcagaagcttgggaaagtggcgaaaatctggaacgcgtggcaaaatattccatggaagatgcgaaagccacctacgaactgggtcgtgaatttctgccgatggaaattcagctgtcacgcctggtgggtcaaccgctgtgggacgtttcgcgtagttccaccggcaatctggttgaatggttcctgctgcgtaaagcgtatgaacgcaacgaactggcaccgaataaaccggatgaacgtgaatatgaacgtcgcctgcgcgaatcttatgccggcggttacgttaaggaaccggaaaaaggcctgtgggaaggtctggtgtctctggattttcgctcactgtacccgtcgattatcattacgcataacgtgtccccggacaccctgaatcgtgaaggctgcatggaatatgatgttgctccggaagtcaaacacaagttttgtaaagactttccgggtttcattccgtcactgctgaaacgtctgctggatgaacgccaggaaatcaaacgtcgcatgaaagcctcgaaggatccgattgaaaagaaaatgctggactatcgtcaacgcgcaatcaaaattctggctaatagctattacggctattacggttatgcgaaggcccgctggtactgcaaagaatgtgcggaatctgtcacggcctggggccgtgaatatatcgaatttgtgcgcaaagaactggaagaaaagttcggtttcaaggttctgtacattgatacggacggcctgtacgcaaccatcccgggtgctaaaccggaagaaattaagcgtaaggccctggaatttgtggaatacatcaacgcaaaactgccgggcctgctggaactggaatatgaaggcttctacgttcgcggctttttcgtcacgaagaaaaagtatgcgctgattgacgaagaaggcaaaatcattacccgtggtctggaaatcgttcgtcgcgattggagtgaaattgccaaagaaacccaggcacgcgttctggaagcaatcctgcgtcatggtgacgtcgaagaagccgttcgcattgtcaaagatgtgacggaaaagctgtcgaaatatgaagtcccgccggaaaaactggtgatccatgaacaaattacccgtgaactgaaggattacaaagcgacgggcccgcacgttgcaattgctaaacgcctggcagcccgtggcatcaagattcgtccgggtaccgttatcagctatattgtcctgaaaggctctggtcgcatcggtgatcgtgctattccgtttgatgaattcgacccgacgaaacaccgttacgatgccgaatattacatcgaaaatcaggtgctgccggccgttgaacgcattctgaaagcatttggctataagaaagaagaactgcgctaccagaaaacccgtcaagtgggcctgggtgcgtggctgaagctgaaaggtaagaaataa

SEQ ID NO: 472 - DNA, 2325 bp, Artificial Sequence
  Synthetic
atgatcctggacgtggactacattaccgaagacggcaaaccgattatccgcatcttcaaaaaagaaaacggcaaattcaaagtggaatatgatcgtaactttcgcccgtatatttacgctctgctgaaagatgacagccagatcgaagaagtccgcaaaattacggcggaacgtcatggtaaaatcgtgcgcatcatcgatgtggaaaaagttgagaaaaaatttctgggccgtccgattaccgtgtggcgcctgtatttcgaacatccgcaagatgttccggctatccgtgacaaagttcgcgaacacagtgcggtcatcgatatttttgaatatgacattccgttcgctaaacgctacctgatcgataaaggtctgattccgatggaaggcgacgaagaactgaaactgctggcctttgatattgaaacgctgtaccacgaaggtgaagaattcggtaaaggcccgattatcatgatctcctatgcagacgaagaagaagcgaaagtcatcacctggaagaaaattgatctgccgtatgtggaagtggttagctctgaacgtgaaatgatcaaacgctttctgaaaatcatccgcgaaaaagatccggacgttattatcacctataacggtgattcattcgacctgccgtacctggtgaaacgtgccgaaaaactgggcatcaaactgacgattggtcgtgacggctcggaaccgaaaatgcagcgcctgggtgatatgaccgcagtcgaaatcaaaggccgtattcattttgatctgtaccacgtgatcacccgcacgattaacctgccgacctatacgctggaagcggtttacgaagccattttcggtaaaccgaaagaaaaagtctatgccgacgaaatcgcagaagcttgggaaagtggcgaaaatctggaacgcgtggcaaaatattccatggaagatgcgaaagccacctacgaactgggtcgtgaatttctgccgatggaaattcagctgtcacgcctggtgggtcaaccgctgtgggacgtttcgcgtagttccaccggcaatctggttgaatggttcctgctgcgtaaagcgtatgaacgcaacgaactggcaccgaataaaccggatgaacgtgaatatgaacgtcgcctgcgcgaatcttatgccggcggttacgttaaggaaccggaaaaaggcctgtgggaaggtctggtgtctctggattttcgctcactgtacccgtcgattatcattacgcataacgtgtccccggacaccctgaatcgtgaaggctgcatggaatatgatgttgctccggaagtcaaacacaagttttgtaaagactttccgggtttcattccgtcactgctgaaacgtctgctggatgaacgccaggaaatcaaacgtcgcatgaaagcctcgaaggatccgattgaaaagaaaatgctggactatcgtcaacgcgcaatcaaaattctggctaatagctattacggctattacggttatgcgaaggcccgctggtactgcaaagaatgtgcggaatctgtcacggcctggggccgtgaatatatcgaatttgtgcgcaaagaactggaagaaaagttcggtttcaaggttctgtacattgatacggacggcctgtacgcaaccatcccgggtgctaaaccggaagaaattaagcgtaaggccctggaatttgtggaatacatcaacgcaaaactgccgggcctgctggaactggaatatgaaggcttctacgttcgcggctttttcgtcacgaagaaaaagtatgcgctgattgacgaagaaggcaaaatcattacccgtggtctggaaatcgttcgtcgcgattggagtgaaattgccaaagaaacccaggcacgtgtcctggaagcaatcctgaaacatggtgatgtggaagaagcggttcgcattgtcaaagaagtgacggaaaagctgtcgaaatatgaagttccgccggaaaaactggtcatccatgaacaaattacccgcgatctgcgtgactacaaagccacgggtccgcacgtggcagttgcaaaacgtctggcagcccgtggcgtgaagattcgtccgggtaccgtgatcagttatattgttctgaaaggctccggtcgcatcggtgaccgtgctattccgtttgatgaattcgacccgacgaaacaccgttacgatgccgaatattacatcgaaaatcaggtcctgccggccgtggaacgcattctgaaagcatttggttatcgcaaggaagatctgcgttaccagaagaccaaacaagtcggcctgggtgcgtggctgaaagtgaaaaagtaa

SEQ ID NO: 473 - DNA, 2331 bp, Artificial Sequence
  Synthetic
atgatcctggacgtggactacattaccgaagacggcaaaccgattatccgcatcttcaaaaaagaaaacggcaaattcaaagtggaatatgatcgtaactttcgcccgtatatttacgctctgctgaaagatgacagccagatcgaagaagtccgcaaaattacggcggaacgtcatggtaaaatcgtgcgcatcatcgatgtggaaaaagttgagaaaaaatttctgggccgtccgattaccgtgtggcgcctgtatttcgaacatccgcaagatgttccggctatccgtgacaaagttcgcgaacacagtgcggtcatcgatatttttgaatatgacattccgttcgctaaacgctacctgatcgataaaggtctgattccgatggaaggcgacgaagaactgaaactgctggcctttgatattgaaacgctgtaccacgaaggtgaagaattcggtaaaggcccgattatcatgatctcctatgcagacgaagaagaagcgaaagtcatcacctggaagaaaattgatctgccgtatgtggaagtggttagctctgaacgtgaaatgatcaaacgctttctgaaaatcatccgcgaaaaagatccggacgttattatcacctataacggtgattcattcgacctgccgtacctggtgaaacgtgccgaaaaactgggcatcaaactgacgattggtcgtgacggctcggaaccgaaaatgcagcgcctgggtgatatgaccgcagtcgaaatcaaaggccgtattcattttgatctgtaccacgtgatcacccgcacgattaacctgccgacctatacgctggaagcggtttacgaagccattttcggtaaaccgaaagaaaaagtctatgccgacgaaatcgcagaagcttgggaaagtggcgaaaatctggaacgcgtggcaaaatattccatggaagatgcgaaagccacctacgaactgggtcgtgaatttctgccgatggaaattcagctgtcacgcctggtgggtcaaccgctgtgggacgtttcgcgtagttccaccggcaatctggttgaatggttcctgctgcgtaaagcgtatgaacgcaacgaactggcaccgaataaaccggatgaacgtgaatatgaacgtcgcctgcgcgaatcttatgccggcggttacgttaaggaaccggaaaaaggcctgtgggaaggtctggtgtctctggattttcgctcactgtacccgtcgattatcattacgcataacgtgtccccggacaccctgaatcgtgaaggctgcatggaatatgatgttgctccggaagtcaaacacaagttttgtaaagactttccgggtttcattccgtcactgctgaaacgtctgctggatgaacgccaggaaatcaaacgtcgcatgaaagcctcgaaggatccgattgaaaagaaaatgctggactatcgtcaacgcgcaatcaaaattctggctaatagctattacggctattacggttatgcgaaggcccgctggtactgcaaagaatgtgcggaatctgtcacggcctggggccgtgaatatatcgaatttgtgcgcaaagaactggaagaaaagttcggtttcaaggttctgtacattgatacggacggcctgtacgcaaccatcccgggtgctaaaccggaagaaattaagcgtaaggccctggaatttgtggaatacatcaacgcaaaactgccgggcctgctggaactggaatatgaaggcttctacgttcgcggctttttcgtcacgaagaaaaagtatgcgctgattgacgaagaaggcaaaatcattacccgtggtctggaaatcgttcgtcgcgattggagtgaaattgccaaagaaacccaggcacgtgtgctggaagctctgctgaaagatggcaatgttgaagaagcggtttccattgtcaaagaagtgacggaaaagctgggtaaatatgaagtcccgccggaaaaactggtgatccatgaacaaattacccgcgaactgaaggattacaaagcgacgggcccgcacgttgctatcgcgaaacgtctggcagcgcgtggcgtgaagattcgtccgggtaccgttatcagctatattgtcctgaaaggctctggtcgtatcggtgaccgcgcgattccgtttgatgaattcgacccgacgaaacatcgctacgatgcagaatattacatcgaaaaccaggttctgccggctgtcgaacgtattctgaaagcgtttggctatcgtgccgaagatctgcgctaccagaaaacccgtcaagtgggcctgggtgtttggctgcaaccgaaaggtaagaaataa

SEQ ID NO: 474 - DNA, 2328 bp, Artificial Sequence
  Synthetic
atgatcctggacgtggactacattaccgaagacggcaaaccgattatccgcatcttcaaaaaagaaaacggcaaattcaaagtggaatatgatcgtaactttcgcccgtatatttacgctctgctgaaagatgacagccagatcgaagaagtccgcaaaattacggcggaacgtcatggtaaaatcgtgcgcatcatcgatgtggaaaaagttgagaaaaaatttctgggccgtccgattaccgtgtggcgcctgtatttcgaacatccgcaagatgttccggctatccgtgacaaagttcgcgaacacagtgcggtcatcgatatttttgaatatgacattccgttcgctaaacgctacctgatcgataaaggtctgattccgatggaaggcgacgaagaactgaaactgctggcctttgatattgaaacgctgtaccacgaaggtgaagaattcggtaaaggcccgattatcatgatctcctatgcagacgaagaagaagcgaaagtcatcacctggaagaaaattgatctgccgtatgtggaagtggttagctctgaacgtgaaatgatcaaacgctttctgaaaatcatccgcgaaaaagatccggacgttattatcacctataacggtgattcattcgacctgccgtacctggtgaaacgtgccgaaaaactgggcatcaaactgacgattggtcgtgacggctcggaaccgaaaatgcagcgcctgggtgatatgaccgcagtcgaaatcaaaggccgtattcattttgatctgtaccacgtgatcacccgcacgattaacctgccgacctatacgctggaagcggtttacgaagccattttcggtaaaccgaaagaaaaagtctatgccgacgaaatcgcagaagcttgggaaagtggcgaaaatctggaacgcgtggcaaaatattccatggaagatgcgaaagccacctacgaactgggtcgtgaatttctgccgatggaaattcagctgtcacgcctggtgggtcaaccgctgtgggacgtttcgcgtagttccaccggcaatctggttgaatggttcctgctgcgtaaagcgtatgaacgcaacgaactggcaccgaataaaccggatgaacgtgaatatgaacgtcgcctgcgcgaatcttatgccggcggttacgttaaggaaccggaaaaaggcctgtgggaaggtctggtgtctctggattttcgctcactgtacccgtcgattatcattacgcataacgtgtccccggacaccctgaatcgtgaaggctgcatggaatatgatgttgctccggaagtcaaacacaagttttgtaaagactttccgggtttcattccgtcactgctgaaacgtctgctggatgaacgccaggaaatcaaacgtcgcatgaaagcctcgaaggatccgattgaaaagaaaatgctggactatcgtcaacgcgcaatcaaaattctggctaatagctattacggctattacggttatgcgaaggcccgctggtactgcaaagaatgtgcggaatctgtcacggcctggggccgtgaatatatcgaatttgtgcgcaaagaactggaagaaaagttcggtttcaaggttctgtacattgatacggacggcctgtacgcaaccatcccgggtgctaaaccggaagaaattaagcgtaaggccctggaatttgtggaatacatcaacgcaaaactgccgggcctgctggaactggaatatgaaggcttctacgttcgcggctttttcgtcacgaagaaaaagtatgcgctgattgacgaagaaggcaaaatcattacccgtggtctggaaatcgttcgtcgcgattggagtgaaattgccaaagaaacccaggcaaaggttctggaagcaattctgaaacatggtaacgtcgaagaagcggtcaagatcgtgaaagaagttaccgaaaaactgtcgaattatgaaattccggtcgaaaagctggtgatctacgaacaaattacgcgcccgctgaacgaatataaagccattggcccgcacgtggcagttgctaaacgtctggcggccaagggtatcaagattaaaccgggcatggtgattggttatgttgtcctgcgcggcgatggtccgatcagcaaacgtgcgatcgccatcgaagaattcgatggcaaaaagcataagtacgacgcagaatactacatcgaaaatcaggttctgccggccgtcgaacgtatcctgaaagcattcggttataagcgtgaagatctgcgctggcagaagaccaaacaagtgggcctgggtgcgtggctgaaagttaaaaagtcttaa

SEQ ID NO: 475 - DNA, 2331 bp, Artificial Sequence
  Synthetic
atgatcctggacgtggactacattaccgaagacggcaaaccgattatccgcatcttcaaaaaagaaaacggcaaattcaaagtggaatatgatcgtaactttcgcccgtatatttacgctctgctgaaagatgacagccagatcgaagaagtccgcaaaattacggcggaacgtcatggtaaaatcgtgcgcatcatcgatgtggaaaaagttgagaaaaaatttctgggccgtccgattaccgtgtggcgcctgtatttcgaacatccgcaagatgttccggctatccgtgacaaagttcgcgaacacagtgcggtcatcgatatttttgaatatgacattccgttcgctaaacgctacctgatcgataaaggtctgattccgatggaaggcgacgaagaactgaaactgctggcctttgatattgaaacgctgtaccacgaaggtgaagaattcggtaaaggcccgattatcatgatctcctatgcagacgaagaagaagcgaaagtcatcacctggaagaaaattgatctgccgtatgtggaagtggttagctctgaacgtgaaatgatcaaacgctttctgaaaatcatccgcgaaaaagatccggacgttattatcacctataacggtgattcattcgacctgccgtacctggtgaaacgtgccgaaaaactgggcatcaaactgacgattggtcgtgacggctcggaaccgaaaatgcagcgcctgggtgatatgaccgcagtcgaaatcaaaggccgtattcattttgatctgtaccacgtgatcacccgcacgattaacctgccgacctatacgctggaagcggtttacgaagccattttcggtaaaccgaaagaaaaagtctatgccgacgaaatcgcagaagcttgggaaagtggcgaaaatctggaacgcgtggcaaaatattccatggaagatgcgaaagccacctacgaactgggtcgtgaatttctgccgatggaaattcagctgtcacgcctggtgggtcaaccgctgtgggacgtttcgcgtagttccaccggcaatctggttgaatggttcctgctgcgtaaagcgtatgaacgcaacgaactggcaccgaataaaccggatgaacgtgaatatgaacgtcgcctgcgcgaatcttatgccggcggttacgttaaggaaccggaaaaaggcctgtgggaaggtctggtgtctctggattttcgctcactgtacccgtcgattatcattacgcataacgtgtccccggacaccctgaatcgtgaaggctgcatggaatatgatgttgctccggaagtcaaacacaagttttgtaaagactttccgggtttcattccgtcactgctgaaacgtctgctggatgaacgccaggaaatcaaacgtcgcatgaaagcctcgaaggatccgattgaaaagaaaatgctggactatcgtcaacgcgcaatcaaaattctggctaatagctattacggctattacggttatgcgaaggcccgctggtactgcaaagaatgtgcggaatctgtcacggcctggggccgtgaatatatcgaatttgtgcgcaaagaactggaagaaaagttcggtttcaaggttctgtacattgatacggacggcctgtacgcaaccatcccgggtgctaaaccggaagaaattaagcgtaaggccctggaatttgtggaatacatcaacgcaaaactgccgggcctgctggaactggaatatgaaggcttctacgttcgcggctttttcgtcacgaagaaaaagtatgcgctgattgacgaagaaggcaaaatcattacccgtggtctggaaatcgttcgtcgcgattggagtgaaattgccaaagaaacccaggcacgtgttctggaagcactgctgaaagatggtaatgtcgaagaagcagtgagtattgttaaagaagtcacggaaaaactgtccaagtatgaagtcccgccggaaaaactggtgattcatgaacaaatcacccgcgaactgaaagattacaaggcgacgggcccgcacgtggcaattgctaaacgtctggcagcgcgtggcgttaagatccgtccgggtaccgttattagctatatcgtcctgaaaggctctggtcgtattggtgaccgcgccatcccgtttgatgaattcgacccggctaaacaccgctacgatgcggaatattacattgaaaatcaggtcctgccggctgtggaacgtatcctgaaagcgtttggctatcgtaaggaagatctgcgctaccagaaaacccgtcaagtgggcctgggtgcgtggctgaaaccgaagggtaaaaagtaa

SEQ ID NO: 476 - DNA, 2331 bp, Artificial Sequence
  Synthetic
atgatcctggacgtggactacattaccgaagacggcaaaccgattatccgcatcttcaaaaaagaaaacggcaaattcaaagtggaatatgatcgtaactttcgcccgtatatttacgctctgctgaaagatgacagccagatcgaagaagtccgcaaaattacggcggaacgtcatggtaaaatcgtgcgcatcatcgatgtggaaaaagttgagaaaaaatttctgggccgtccgattaccgtgtggcgcctgtatttcgaacatccgcaagatgttccggctatccgtgacaaagttcgcgaacacagtgcggtcatcgatatttttgaatatgacattccgttcgctaaacgctacctgatcgataaaggtctgattccgatggaaggcgacgaagaactgaaactgctggcctttgatattgaaacgctgtaccacgaaggtgaagaattcggtaaaggcccgattatcatgatctcctatgcagacgaagaagaagcgaaagtcatcacctggaagaaaattgatctgccgtatgtggaagtggttagctctgaacgtgaaatgatcaaacgctttctgaaaatcatccgcgaaaaagatccggacgttattatcacctataacggtgattcattcgacctgccgtacctggtgaaacgtgccgaaaaactgggcatcaaactgacgattggtcgtgacggctcggaaccgaaaatgcagcgcctgggtgatatgaccgcagtcgaaatcaaaggccgtattcattttgatctgtaccacgtgatcacccgcacgattaacctgccgacctatacgctggaagcggtttacgaagccattttcggtaaaccgaaagaaaaagtctatgccgacgaaatcgcagaagcttgggaaagtggcgaaaatctggaacgcgtggcaaaatattccatggaagatgcgaaagccacctacgaactgggtcgtgaatttctgccgatggaaattcagctgtcacgcctggtgggtcaaccgctgtgggacgtttcgcgtagttccaccggcaatctggttgaatggttcctgctgcgtaaagcgtatgaacgcaacgaactggcaccgaataaaccggatgaacgtgaatatgaacgtcgcctgcgcgaatcttatgccggcggttacgttaaggaaccggaaaaaggcctgtgggaaggtctggtgtctctggattttcgctcactgtacccgtcgattatcattacgcataacgtgtccccggacaccctgaatcgtgaaggctgcatggaatatgatgttgctccggaagtcaaacacaagttttgtaaagactttccgggtttcattccgtcactgctgaaacgtctgctggatgaacgccaggaaatcaaacgtcgcatgaaagcctcgaaggatccgattgaaaagaaaatgctggactatcgtcaacgcgcaatcaaaattctggctaatagctattacggctattacggttatgcgaaggcccgctggtactgcaaagaatgtgcggaatctgtcacggcctggggccgtgaatatatcgaatttgtgcgcaaagaactggaagaaaagttcggtttcaaggttctgtacattgatacggacggcctgtacgcaaccatcccgggtgctaaaccggaagaaattaagcgtaaggccctggaatttgtggaatacatcaacgcaaaactgccgggcctgctggaactggaatatgaaggcttctacgttcgcggctttttcgtcacgaagaaaaagtatgcgctgattgacgaagaaggcaaaatcattacccgtggtctggaaatcgttcgtcgcgattggagtgaaattgccaaagaaacccaggcacgcgtcctggaagcaatcctgaaagatggtgacgtggaagaagccgtccgtattgtgaaagaagttacggaaaaactgtccaaatatgaagttccgccggaaaaactggtcatccatgaacaaattacccgcgaactgaaagattacaaagcgacgggcccgcacgtcgcaatcgctaaacgtctggcggcgcgtggcgtgaaaattcgtccgggtaccgtgatctcatatattgttctgaaaggctcgggtcgtatcggtgaccgcgctattccgtttgatgaattcgacccgaaaaaacacaaatacgatgcggaatactacatcgaaaaccaggttctgccggccgtcgaacgtattctgcgcgcatttggctaccgtaaagaagatctgcgttatcaaaaaaccaaacaagtgggtctgggtgcgtggctgaaaccgaaaggtaaaaaataa

SEQ ID NO: 477 - DNA, 2328 bp, Artificial Sequence
  Synthetic
atgatcctggacgtggactacattaccgaagacggcaaaccgattatccgcatcttcaaaaaagaaaacggcaaattcaaagtggaatatgatcgtaactttcgcccgtatatttacgctctgctgaaagatgacagccagatcgaagaagtccgcaaaattacggcggaacgtcatggtaaaatcgtgcgcatcatcgatgtggaaaaagttgagaaaaaatttctgggccgtccgattaccgtgtggcgcctgtatttcgaacatccgcaagatgttccggctatccgtgacaaagttcgcgaacacagtgcggtcatcgatatttttgaatatgacattccgttcgctaaacgctacctgatcgataaaggtctgattccgatggaaggcgacgaagaactgaaactgctggcctttgatattgaaacgctgtaccacgaaggtgaagaattcggtaaaggcccgattatcatgatctcctatgcagacgaagaagaagcgaaagtcatcacctggaagaaaattgatctgccgtatgtggaagtggttagctctgaacgtgaaatgatcaaacgctttctgaaaatcatccgcgaaaaagatccggacgttattatcacctataacggtgattcattcgacctgccgtacctggtgaaacgtgccgaaaaactgggcatcaaactgacgattggtcgtgacggctcggaaccgaaaatgcagcgcctgggtgatatgaccgcagtcgaaatcaaaggccgtattcattttgatctgtaccacgtgatcacccgcacgattaacctgccgacctatacgctggaagcggtttacgaagccattttcggtaaaccgaaagaaaaagtctatgccgacgaaatcgcagaagcttgggaaagtggcgaaaatctggaacgcgtggcaaaatattccatggaagatgcgaaagccacctacgaactgggtcgtgaatttctgccgatggaaattcagctgtcacgcctggtgggtcaaccgctgtgggacgtttcgcgtagttccaccggcaatctggttgaatggttcctgctgcgtaaagcgtatgaacgcaacgaactggcaccgaataaaccggatgaacgtgaatatgaacgtcgcctgcgcgaatcttatgccggcggttacgttaaggaaccggaaaaaggcctgtgggaaggtctggtgtctctggattttcgctcactgtacccgtcgattatcattacgcataacgtgtccccggacaccctgaatcgtgaaggctgcatggaatatgatgttgctccggaagtcaaacacaagttttgtaaagactttccgggtttcattccgtcactgctgaaacgtctgctggatgaacgccaggaaatcaaacgtcgcatgaaagcctcgaaggatccgattgaaaagaaaatgctggactatcgtcaacgcgcaatcaaaattctggctaatagctattacggctattacggttatgcgaaggcccgctggtactgcaaagaatgtgcggaatctgtcacggcctggggccgtgaatatatcgaatttgtgcgcaaagaactggaagaaaagttcggtttcaaggttctgtacattgatacggacggcctgtacgcaaccatcccgggtgctaaaccggaagaaattaagcgtaaggccctggaatttgtggaatacatcaacgcaaaactgccgggcctgctggaactggaatatgaaggcttctacgttcgcggctttttcgtcacgaagaaaaagtatgcgctgattgacgaagaaggcaaaatcattacccgtggtctggaaatcgttcgtcgcgattggagtgaaattgccaaagaaacccaggcacgtgttctggaagcaattctgaaacatggtaacgtcgaagaagcggtcaaaatcgtgaaagaagttacggaaaaactgtctaactacgaaattccgccggaaaaactggccatctacgaacaaattacccgcccgctgcatgaatataaagcaatcggtccgcacgtcgcagtggcaaaacgtctggcagcacgcggcgttaaagtcaaaccgggtatggtcatcggctatattgtgctgcgtggtgatggcccgatcagcaaccgcgcaattctggctgaagaatacgatctgaaaaaacacaaatacgacgccgaatattacatcgaaaatcaggttctgccggctgtcctgcgtattctggaagcgtttggctatcgtaaagaagatctgcgctggcagaaaacccgtcaaacgggtctgacctcatggctgaatattaaaaaatcgtaa

SEQ ID NO: 478 - DNA, 2328 bp, Artificial Sequence
  Synthetic
atgatcctggacgtggactacattaccgaagacggcaaaccgattatccgcatcttcaaaaaagaaaacggcaaattcaaagtggaatatgatcgtaactttcgcccgtatatttacgctctgctgaaagatgacagccagatcgaagaagtccgcaaaattacggcggaacgtcatggtaaaatcgtgcgcatcatcgatgtggaaaaagttgagaaaaaatttctgggccgtccgattaccgtgtggcgcctgtatttcgaacatccgcaagatgttccggctatccgtgacaaagttcgcgaacacagtgcggtcatcgatatttttgaatatgacattccgttcgctaaacgctacctgatcgataaaggtctgattccgatggaaggcgacgaagaactgaaactgctggcctttgatattgaaacgctgtaccacgaaggtgaagaattcggtaaaggcccgattatcatgatctcctatgcagacgaagaagaagcgaaagtcatcacctggaagaaaattgatctgccgtatgtggaagtggttagctctgaacgtgaaatgatcaaacgctttctgaaaatcatccgcgaaaaagatccggacgttattatcacctataacggtgattcattcgacctgccgtacctggtgaaacgtgccgaaaaactgggcatcaaactgacgattggtcgtgacggctcggaaccgaaaatgcagcgcctgggtgatatgaccgcagtcgaaatcaaaggccgtattcattttgatctgtaccacgtgatcacccgcacgattaacctgccgacctatacgctggaagcggtttacgaagccattttcggtaaaccgaaagaaaaagtctatgccgacgaaatcgcagaagcttgggaaagtggcgaaaatctggaacgcgtggcaaaatattccatggaagatgcgaaagccacctacgaactgggtcgtgaatttctgccgatggaaattcagctgtcacgcctggtgggtcaaccgctgtgggacgtttcgcgtagttccaccggcaatctggttgaatggttcctgctgcgtaaagcgtatgaacgcaacgaactggcaccgaataaaccggatgaacgtgaatatgaacgtcgcctgcgcgaatcttatgccggcggttacgttaaggaaccggaaaaaggcctgtgggaaggtctggtgtctctggattttcgctcactgtacccgtcgattatcattacgcataacgtgtccccggacaccctgaatcgtgaaggctgcatggaatatgatgttgctccggaagtcaaacacaagttttgtaaagactttccgggtttcattccgtcactgctgaaacgtctgctggatgaacgccaggaaatcaaacgtcgcatgaaagcctcgaaggatccgattgaaaagaaaatgctggactatcgtcaacgcgcaatcaaaattctggctaatagctattacggctattacggttatgcgaaggcccgctggtactgcaaagaatgtgcggaatctgtcacggcctggggccgtgaatatatcgaatttgtgcgcaaagaactggaagaaaagttcggtttcaaggttctgtacattgatacggacggcctgtacgcaaccatcccgggtgctaaaccggaagaaattaagcgtaaggccctggaatttgtggaatacatcaacgcaaaactgccgggcctgctggaactggaatatgaaggcttctacgttcgcggctttttcgtcacgaagaaaaagtatgcgctgattgacgaagaaggcaaaatcattacccgtggtctggaaatcgttcgtcgcgattggagtgaaattgccaaagaaacccaggcaaaagttctggaagcaatcctgaaacatggtaatgtcgaagaagcagtgaaaattgtcaaggaagtgacggaaaaactgtcgaagtatgaaatcccgccggaaaaactggtgatctacgaacaaattacccgcccgctgcatgaatataaagcgattggcccgcacgtggcagttgctaaacgtctggcagcccgcggtgtcaaagtgcgtccgggcatggtgatcggttatattgttctgcgtggcgatggtccgatcagtaaacgcgcgattctggccgaagaatttgatccgcgcaaacacaagtacgacgccgaatattacatcgaaaaccaggtgctgccggctgttctgcgtattctggaagcgttcggctatcgtaaagaagatctgcgctggcagaaaaccaagcaaacgggtctgaccgcatggctgaatgtgaaaaagaaataa

SEQ ID NO: 479 - DNA, 2331 bp, Artificial Sequence
  Synthetic
atgatcctggacgtggactacattaccgaagacggcaaaccgattatccgcatcttcaaaaaagaaaacggcaaattcaaagtggaatatgatcgtaactttcgcccgtatatttacgctctgctgaaagatgacagccagatcgaagaagtccgcaaaattacggcggaacgtcatggtaaaatcgtgcgcatcatcgatgtggaaaaagttgagaaaaaatttctgggccgtccgattaccgtgtggcgcctgtatttcgaacatccgcaagatgttccggctatccgtgacaaagttcgcgaacacagtgcggtcatcgatatttttgaatatgacattccgttcgctaaacgctacctgatcgataaaggtctgattccgatggaaggcgacgaagaactgaaactgctggcctttgatattgaaacgctgtaccacgaaggtgaagaattcggtaaaggcccgattatcatgatctcctatgcagacgaagaagaagcgaaagtcatcacctggaagaaaattgatctgccgtatgtggaagtggttagctctgaacgtgaaatgatcaaacgctttctgaaaatcatccgcgaaaaagatccggacgttattatcacctataacggtgattcattcgacctgccgtacctggtgaaacgtgccgaaaaactgggcatcaaactgacgattggtcgtgacggctcggaaccgaaaatgcagcgcctgggtgatatgaccgcagtcgaaatcaaaggccgtattcattttgatctgtaccacgtgatcacccgcacgattaacctgccgacctatacgctggaagcggtttacgaagccattttcggtaaaccgaaagaaaaagtctatgccgacgaaatcgcagaagcttgggaaagtggcgaaaatctggaacgcgtggcaaaatattccatggaagatgcgaaagccacctacgaactgggtcgtgaatttctgccgatggaaattcagctgtcacgcctggtgggtcaaccgctgtgggacgtttcgcgtagttccaccggcaatctggttgaatggttcctgctgcgtaaagcgtatgaacgcaacgaagtggcaccgaataaaccggatgaacgtgaatatcagcgtcgcctgcgcgaaagttatgcaggcggttacgtgaaagaaccggaaaaaggtctgtgggaaggcctggtttatctggattttcgtgcgctgtacccgagcattatcattacgcataacgtttctccggacaccctgaatcgtgaaggctgccgcgaatatgatattgcgccggaagtgggtcacaaattttgtaaagatatcccgggcttcattccgagcctgctgaaacgtctgctggaagaacgccagaaaatcaaaacgaaaatgaaagaaacccaagatccgatcgaaaaaattctgctggactaccgtcagcgcgcgatcaaaattctggccaacagttattacggttattacggctatgcaaaagctcgctggtactgcaaagaatgtgcagaatccgttaccgcttggggtcgtaaatacatcgaattcgtctggaaagaactggaagaaaaattcggtttcaaagttctgtacatcgatacggacggtctgtacgcaaccatcccgggcggtaaaccggaagaaattaagaaaaaagccctggaatttgtggattacattaatgcaaaactgccgggcctgctggaactggaatatgaaggtttctacgtgcgtggctttttcgttaccaagaaaaaatatgccgtcattgacgaagaaggtaaagtgatcacccgcggcctggaaattgttcgtcgcgattggagtgaaattgccaaagaaacccaggcacgcgttctggaagcaatcctgcgtcatggtgacgtcgaagaagccgttcgcattgtcaaagatgtgacggaaaagctgtcgaaatatgaagtcccgccggaaaaactggtgatccatgaacaaattacccgtgaactgaaggattacaaagcgacgggcccgcacgttgcaattgctaaacgcctggcagcccgtggcatcaagattcgtccgggtaccgttatcagctatattgtcctgaaaggctctggtcgcatcggtgatcgtgctattccgtttgatgaattcgacccgacgaaacaccgttacgatgccgaatattacatcgaaaatcaggtgctgccggccgttgaacgcattctgaaagcatttggctataagaaagaagaactgcgctaccagaaaacccgtcaagtgggcctgggtgcgtggctgaagctgaaaggtaagaaataa

SEQ ID NO: 480 - DNA, 2325 bp, Artificial Sequence
  Synthetic
atgatcctggacgtggactacattaccgaagacggcaaaccgattatccgcatcttcaaaaaagaaaacggcaaattcaaagtggaatatgatcgtaactttcgcccgtatatttacgctctgctgaaagatgacagccagatcgaagaagtccgcaaaattacggcggaacgtcatggtaaaatcgtgcgcatcatcgatgtggaaaaagttgagaaaaaatttctgggccgtccgattaccgtgtggcgcctgtatttcgaacatccgcaagatgttccggctatccgtgacaaagttcgcgaacacagtgcggtcatcgatatttttgaatatgacattccgttcgctaaacgctacctgatcgataaaggtctgattccgatggaaggcgacgaagaactgaaactgctggcctttgatattgaaacgctgtaccacgaaggtgaagaattcggtaaaggcccgattatcatgatctcctatgcagacgaagaagaagcgaaagtcatcacctggaagaaaattgatctgccgtatgtggaagtggttagctctgaacgtgaaatgatcaaacgctttctgaaaatcatccgcgaaaaagatccggacgttattatcacctataacggtgattcattcgacctgccgtacctggtgaaacgtgccgaaaaactgggcatcaaactgacgattggtcgtgacggctcggaaccgaaaatgcagcgcctgggtgatatgaccgcagtcgaaatcaaaggccgtattcattttgatctgtaccacgtgatcacccgcacgattaacctgccgacctatacgctggaagcggtttacgaagccattttcggtaaaccgaaagaaaaagtctatgccgacgaaatcgcagaagcttgggaaagtggcgaaaatctggaacgcgtggcaaaatattccatggaagatgcgaaagccacctacgaactgggtcgtgaatttctgccgatggaaattcagctgtcacgcctggtgggtcaaccgctgtgggacgtttcgcgtagttccaccggcaatctggttgaatggttcctgctgcgtaaagcgtatgaacgcaacgaagtggcaccgaataaaccggatgaacgtgaatatcagcgtcgcctgcgcgaaagttatgcaggcggttacgtgaaagaaccggaaaaaggtctgtgggaaggcctggtttatctggattttcgtgcgctgtacccgagcattatcattacgcataacgtttctccggacaccctgaatcgtgaaggctgccgcgaatatgatattgcgccggaagtgggtcacaaattttgtaaagatatcccgggcttcattccgagcctgctgaaacgtctgctggaagaacgccagaaaatcaaaacgaaaatgaaagaaacccaagatccgatcgaaaaaattctgctggactaccgtcagcgcgcgatcaaaattctggccaacagttattacggttattacggctatgcaaaagctcgctggtactgcaaagaatgtgcagaatccgttaccgcttggggtcgtaaatacatcgaattcgtctggaaagaactggaagaaaaattcggtttcaaagttctgtacatcgatacggacggtctgtacgcaaccatcccgggcggtaaaccggaagaaattaagaaaaaagccctggaatttgtggattacattaatgcaaaactgccgggcctgctggaactggaatatgaaggtttctacgtgcgtggctttttcgttaccaagaaaaaatatgccgtcattgacgaagaaggtaaagtgatcacccgcggcctggaaattgttcgtcgcgattggagtgaaattgccaaagaaacccaggcacgtgtcctggaagcaatcctgaaacatggtgatgtggaagaagcggttcgcattgtcaaagaagtgacggaaaagctgtcgaaatatgaagttccgccggaaaaactggtcatccatgaacaaattacccgcgatctgcgtgactacaaagccacgggtccgcacgtggcagttgcaaaacgtctggcagcccgtggcgtgaagattcgtccgggtaccgtgatcagttatattgttctgaaaggctccggtcgcatcggtgaccgtgctattccgtttgatgaattcgacccgacgaaacaccgttacgatgccgaatattacatcgaaaatcaggtcctgccggccgtggaacgcattctgaaagcatttggttatcgcaaggaagatctgcgttaccagaagaccaaacaagtcggcctgggtgcgtggctgaaagtgaaaaagtaa

SEQ ID NO: 481 - DNA, 2331 bp, Artificial Sequence
  Synthetic
atgatcctggacgtggactacattaccgaagacggcaaaccgattatccgcatcttcaaaaaagaaaacggcaaattcaaagtggaatatgatcgtaactttcgcccgtatatttacgctctgctgaaagatgacagccagatcgaagaagtccgcaaaattacggcggaacgtcatggtaaaatcgtgcgcatcatcgatgtggaaaaagttgagaaaaaatttctgggccgtccgattaccgtgtggcgcctgtatttcgaacatccgcaagatgttccggctatccgtgacaaagttcgcgaacacagtgcggtcatcgatatttttgaatatgacattccgttcgctaaacgctacctgatcgataaaggtctgattccgatggaaggcgacgaagaactgaaactgctggcctttgatattgaaacgctgtaccacgaaggtgaagaattcggtaaaggcccgattatcatgatctcctatgcagacgaagaagaagcgaaagtcatcacctggaagaaaattgatctgccgtatgtggaagtggttagctctgaacgtgaaatgatcaaacgctttctgaaaatcatccgcgaaaaagatccggacgttattatcacctataacggtgattcattcgacctgccgtacctggtgaaacgtgccgaaaaactgggcatcaaactgacgattggtcgtgacggctcggaaccgaaaatgcagcgcctgggtgatatgaccgcagtcgaaatcaaaggccgtattcattttgatctgtaccacgtgatcacccgcacgattaacctgccgacctatacgctggaagcggtttacgaagccattttcggtaaaccgaaagaaaaagtctatgccgacgaaatcgcagaagcttgggaaagtggcgaaaatctggaacgcgtggcaaaatattccatggaagatgcgaaagccacctacgaactgggtcgtgaatttctgccgatggaaattcagctgtcacgcctggtgggtcaaccgctgtgggacgtttcgcgtagttccaccggcaatctggttgaatggttcctgctgcgtaaagcgtatgaacgcaacgaagtggcaccgaataaaccggatgaacgtgaatatcagcgtcgcctgcgcgaaagttatgcaggcggttacgtgaaagaaccggaaaaaggtctgtgggaaggcctggtttatctggattttcgtgcgctgtacccgagcattatcattacgcataacgtttctccggacaccctgaatcgtgaaggctgccgcgaatatgatattgcgccggaagtgggtcacaaattttgtaaagatatcccgggcttcattccgagcctgctgaaacgtctgctggaagaacgccagaaaatcaaaacgaaaatgaaagaaacccaagatccgatcgaaaaaattctgctggactaccgtcagcgcgcgatcaaaattctggccaacagttattacggttattacggctatgcaaaagctcgctggtactgcaaagaatgtgcagaatccgttaccgcttggggtcgtaaatacatcgaattcgtctggaaagaactggaagaaaaattcggtttcaaagttctgtacatcgatacggacggtctgtacgcaaccatcccgggcggtaaaccggaagaaattaagaaaaaagccctggaatttgtggattacattaatgcaaaactgccgggcctgctggaactggaatatgaaggtttctacgtgcgtggctttttcgttaccaagaaaaaatatgccgtcattgacgaagaaggtaaagtgatcacccgcggcctggaaattgttcgtcgcgattggagtgaaattgccaaagaaacccaggcacgtgtgctggaagctctgctgaaagatggcaatgttgaagaagcggtttccattgtcaaagaagtgacggaaaagctgggtaaatatgaagtcccgccggaaaaactggtgatccatgaacaaattacccgcgaactgaaggattacaaagcgacgggcccgcacgttgctatcgcgaaacgtctggcagcgcgtggcgtgaagattcgtccgggtaccgttatcagctatattgtcctgaaaggctctggtcgtatcggtgaccgcgcgattccgtttgatgaattcgacccgacgaaacatcgctacgatgcagaatattacatcgaaaaccaggttctgccggctgtcgaacgtattctgaaagcgtttggctatcgtgccgaagatctgcgctaccagaaaacccgtcaagtgggcctgggtgtttggctgcaaccgaaaggtaagaaataa

SEQ ID NO: 482 - DNA, 2328 bp, Artificial Sequence
  Synthetic
atgatcctggacgtggactacattaccgaagacggcaaaccgattatccgcatcttcaaaaaagaaaacggcaaattcaaagtggaatatgatcgtaactttcgcccgtatatttacgctctgctgaaagatgacagccagatcgaagaagtccgcaaaattacggcggaacgtcatggtaaaatcgtgcgcatcatcgatgtggaaaaagttgagaaaaaatttctgggccgtccgattaccgtgtggcgcctgtatttcgaacatccgcaagatgttccggctatccgtgacaaagttcgcgaacacagtgcggtcatcgatatttttgaatatgacattccgttcgctaaacgctacctgatcgataaaggtctgattccgatggaaggcgacgaagaactgaaactgctggcctttgatattgaaacgctgtaccacgaaggtgaagaattcggtaaaggcccgattatcatgatctcctatgcagacgaagaagaagcgaaagtcatcacctggaagaaaattgatctgccgtatgtggaagtggttagctctgaacgtgaaatgatcaaacgctttctgaaaatcatccgcgaaaaagatccggacgttattatcacctataacggtgattcattcgacctgccgtacctggtgaaacgtgccgaaaaactgggcatcaaactgacgattggtcgtgacggctcggaaccgaaaatgcagcgcctgggtgatatgaccgcagtcgaaatcaaaggccgtattcattttgatctgtaccacgtgatcacccgcacgattaacctgccgacctatacgctggaagcggtttacgaagccattttcggtaaaccgaaagaaaaagtctatgccgacgaaatcgcagaagcttgggaaagtggcgaaaatctggaacgcgtggcaaaatattccatggaagatgcgaaagccacctacgaactgggtcgtgaatttctgccgatggaaattcagctgtcacgcctggtgggtcaaccgctgtgggacgtttcgcgtagttccaccggcaatctggttgaatggttcctgctgcgtaaagcgtatgaacgcaacgaagtggcaccgaataaaccggatgaacgtgaatatcagcgtcgcctgcgcgaaagttatgcaggcggttacgtgaaagaaccggaaaaaggtctgtgggaaggcctggtttatctggattttcgtgcgctgtacccgagcattatcattacgcataacgtttctccggacaccctgaatcgtgaaggctgccgcgaatatgatattgcgccggaagtgggtcacaaattttgtaaagatatcccgggcttcattccgagcctgctgaaacgtctgctggaagaacgccagaaaatcaaaacgaaaatgaaagaaacccaagatccgatcgaaaaaattctgctggactaccgtcagcgcgcgatcaaaattctggccaacagttattacggttattacggctatgcaaaagctcgctggtactgcaaagaatgtgcagaatccgttaccgcttggggtcgtaaatacatcgaattcgtctggaaagaactggaagaaaaattcggtttcaaagttctgtacatcgatacggacggtctgtacgcaaccatcccgggcggtaaaccggaagaaattaagaaaaaagccctggaatttgtggattacattaatgcaaaactgccgggcctgctggaactggaatatgaaggtttctacgtgcgtggctttttcgttaccaagaaaaaatatgccgtcattgacgaagaaggtaaagtgatcacccgcggcctggaaattgttcgtcgcgattggagtgaaattgccaaagaaacccaggcaaaggttctggaagcaattctgaaacatggtaacgtcgaagaagcggtcaagatcgtgaaagaagttaccgaaaaactgtcgaattatgaaattccggtcgaaaagctggtgatctacgaacaaattacgcgcccgctgaacgaatataaagccattggcccgcacgtggcagttgctaaacgtctggcggccaagggtatcaagattaaaccgggcatggtgattggttatgttgtcctgcgcggcgatggtccgatcagcaaacgtgcgatcgccatcgaagaattcgatggcaaaaagcataagtacgacgcagaatactacatcgaaaatcaggttctgccggccgtcgaacgtatcctgaaagcattcggttataagcgtgaagatctgcgctggcagaagaccaaacaagtgggcctgggtgcgtggctgaaagttaaaaagtcttaa

SEQ ID NO: 483 - DNA, 2331 bp, Artificial Sequence
  Synthetic
atgatcctggacgtggactacattaccgaagacggcaaaccgattatccgcatcttcaaaaaagaaaacggcaaattcaaagtggaatatgatcgtaactttcgcccgtatatttacgctctgctgaaagatgacagccagatcgaagaagtccgcaaaattacggcggaacgtcatggtaaaatcgtgcgcatcatcgatgtggaaaaagttgagaaaaaatttctgggccgtccgattaccgtgtggcgcctgtatttcgaacatccgcaagatgttccggctatccgtgacaaagttcgcgaacacagtgcggtcatcgatatttttgaatatgacattccgttcgctaaacgctacctgatcgataaaggtctgattccgatggaaggcgacgaagaactgaaactgctggcctttgatattgaaacgctgtaccacgaaggtgaagaattcggtaaaggcccgattatcatgatctcctatgcagacgaagaagaagcgaaagtcatcacctggaagaaaattgatctgccgtatgtggaagtggttagctctgaacgtgaaatgatcaaacgctttctgaaaatcatccgcgaaaaagatccggacgttattatcacctataacggtgattcattcgacctgccgtacctggtgaaacgtgccgaaaaactgggcatcaaactgacgattggtcgtgacggctcggaaccgaaaatgcagcgcctgggtgatatgaccgcagtcgaaatcaaaggccgtattcattttgatctgtaccacgtgatcacccgcacgattaacctgccgacctatacgctggaagcggtttacgaagccattttcggtaaaccgaaagaaaaagtctatgccgacgaaatcgcagaagcttgggaaagtggcgaaaatctggaacgcgtggcaaaatattccatggaagatgcgaaagccacctacgaactgggtcgtgaatttctgccgatggaaattcagctgtcacgcctggtgggtcaaccgctgtgggacgtttcgcgtagttccaccggcaatctggttgaatggttcctgctgcgtaaagcgtatgaacgcaacgaagtggcaccgaataaaccggatgaacgtgaatatcagcgtcgcctgcgcgaaagttatgcaggcggttacgtgaaagaaccggaaaaaggtctgtgggaaggcctggtttatctggattttcgtgcgctgtacccgagcattatcattacgcataacgtttctccggacaccctgaatcgtgaaggctgccgcgaatatgatattgcgccggaagtgggtcacaaattttgtaaagatatcccgggcttcattccgagcctgctgaaacgtctgctggaagaacgccagaaaatcaaaacgaaaatgaaagaaacccaagatccgatcgaaaaaattctgctggactaccgtcagcgcgcgatcaaaattctggccaacagttattacggttattacggctatgcaaaagctcgctggtactgcaaagaatgtgcagaatccgttaccgcttggggtcgtaaatacatcgaattcgtctggaaagaactggaagaaaaattcggtttcaaagttctgtacatcgatacggacggtctgtacgcaaccatcccgggcggtaaaccggaagaaattaagaaaaaagccctggaatttgtggattacattaatgcaaaactgccgggcctgctggaactggaatatgaaggtttctacgtgcgtggctttttcgttaccaagaaaaaatatgccgtcattgacgaagaaggtaaagtgatcacccgcggcctggaaattgttcgtcgcgattggagtgaaattgccaaagaaacccaggcacgtgttctggaagcactgctgaaagatggtaatgtcgaagaagcagtgagtattgttaaagaagtcacggaaaaactgtccaagtatgaagtcccgccggaaaaactggtgattcatgaacaaatcacccgcgaactgaaagattacaaggcgacgggcccgcacgtggcaattgctaaacgtctggcagcgcgtggcgttaagatccgtccgggtaccgttattagctatatcgtcctgaaaggctctggtcgtattggtgaccgcgccatcccgtttgatgaattcgacccggctaaacaccgctacgatgcggaatattacattgaaaatcaggtcctgccggctgtggaacgtatcctgaaagcgtttggctatcgtaaggaagatctgcgctaccagaaaacccgtcaagtgggcctgggtgcgtggctgaaaccgaagggtaaaaagtaa

SEQ ID NO: 484 - DNA, 2331 bp, Artificial Sequence
  Synthetic
atgatcctggacgtggactacattaccgaagacggcaaaccgattatccgcatcttcaaaaaagaaaacggcaaattcaaagtggaatatgatcgtaactttcgcccgtatatttacgctctgctgaaagatgacagccagatcgaagaagtccgcaaaattacggcggaacgtcatggtaaaatcgtgcgcatcatcgatgtggaaaaagttgagaaaaaatttctgggccgtccgattaccgtgtggcgcctgtatttcgaacatccgcaagatgttccggctatccgtgacaaagttcgcgaacacagtgcggtcatcgatatttttgaatatgacattccgttcgctaaacgctacctgatcgataaaggtctgattccgatggaaggcgacgaagaactgaaactgctggcctttgatattgaaacgctgtaccacgaaggtgaagaattcggtaaaggcccgattatcatgatctcctatgcagacgaagaagaagcgaaagtcatcacctggaagaaaattgatctgccgtatgtggaagtggttagctctgaacgtgaaatgatcaaacgctttctgaaaatcatccgcgaaaaagatccggacgttattatcacctataacggtgattcattcgacctgccgtacctggtgaaacgtgccgaaaaactgggcatcaaactgacgattggtcgtgacggctcggaaccgaaaatgcagcgcctgggtgatatgaccgcagtcgaaatcaaaggccgtattcattttgatctgtaccacgtgatcacccgcacgattaacctgccgacctatacgctggaagcggtttacgaagccattttcggtaaaccgaaagaaaaagtctatgccgacgaaatcgcagaagcttgggaaagtggcgaaaatctggaacgcgtggcaaaatattccatggaagatgcgaaagccacctacgaactgggtcgtgaatttctgccgatggaaattcagctgtcacgcctggtgggtcaaccgctgtgggacgtttcgcgtagttccaccggcaatctggttgaatggttcctgctgcgtaaagcgtatgaacgcaacgaagtggcaccgaataaaccggatgaacgtgaatatcagcgtcgcctgcgcgaaagttatgcaggcggttacgtgaaagaaccggaaaaaggtctgtgggaaggcctggtttatctggattttcgtgcgctgtacccgagcattatcattacgcataacgtttctccggacaccctgaatcgtgaaggctgccgcgaatatgatattgcgccggaagtgggtcacaaattttgtaaagatatcccgggcttcattccgagcctgctgaaacgtctgctggaagaacgccagaaaatcaaaacgaaaatgaaagaaacccaagatccgatcgaaaaaattctgctggactaccgtcagcgcgcgatcaaaattctggccaacagttattacggttattacggctatgcaaaagctcgctggtactgcaaagaatgtgcagaatccgttaccgcttggggtcgtaaatacatcgaattcgtctggaaagaactggaagaaaaattcggtttcaaagttctgtacatcgatacggacggtctgtacgcaaccatcccgggcggtaaaccggaagaaattaagaaaaaagccctggaatttgtggattacattaatgcaaaactgccgggcctgctggaactggaatatgaaggtttctacgtgcgtggctttttcgttaccaagaaaaaatatgccgtcattgacgaagaaggtaaagtgatcacccgcggcctggaaattgttcgtcgcgattggagtgaaattgccaaagaaacccaggcacgcgtcctggaagcaatcctgaaagatggtgacgtggaagaagccgtccgtattgtgaaagaagttacggaaaaactgtccaaatatgaagttccgccggaaaaactggtcatccatgaacaaattacccgcgaactgaaagattacaaagcgacgggcccgcacgtcgcaatcgctaaacgtctggcggcgcgtggcgtgaaaattcgtccgggtaccgtgatctcatatattgttctgaaaggctcgggtcgtatcggtgaccgcgctattccgtttgatgaattcgacccgaaaaaacacaaatacgatgcggaatactacatcgaaaaccaggttctgccggccgtcgaacgtattctgcgcgcatttggctaccgtaaagaagatctgcgttatcaaaaaaccaaacaagtgggtctgggtgcgtggctgaaaccgaaaggtaaaaaataa

SEQ ID NO: 485 - DNA, 2328 bp, Artificial Sequence
  Synthetic
atgatcctggacgtggactacattaccgaagacggcaaaccgattatccgcatcttcaaaaaagaaaacggcaaattcaaagtggaatatgatcgtaactttcgcccgtatatttacgctctgctgaaagatgacagccagatcgaagaagtccgcaaaattacggcggaacgtcatggtaaaatcgtgcgcatcatcgatgtggaaaaagttgagaaaaaatttctgggccgtccgattaccgtgtggcgcctgtatttcgaacatccgcaagatgttccggctatccgtgacaaagttcgcgaacacagtgcggtcatcgatatttttgaatatgacattccgttcgctaaacgctacctgatcgataaaggtctgattccgatggaaggcgacgaagaactgaaactgctggcctttgatattgaaacgctgtaccacgaaggtgaagaattcggtaaaggcccgattatcatgatctcctatgcagacgaagaagaagcgaaagtcatcacctggaagaaaattgatctgccgtatgtggaagtggttagctctgaacgtgaaatgatcaaacgctttctgaaaatcatccgcgaaaaagatccggacgttattatcacctataacggtgattcattcgacctgccgtacctggtgaaacgtgccgaaaaactgggcatcaaactgacgattggtcgtgacggctcggaaccgaaaatgcagcgcctgggtgatatgaccgcagtcgaaatcaaaggccgtattcattttgatctgtaccacgtgatcacccgcacgattaacctgccgacctatacgctggaagcggtttacgaagccattttcggtaaaccgaaagaaaaagtctatgccgacgaaatcgcagaagcttgggaaagtggcgaaaatctggaacgcgtggcaaaatattccatggaagatgcgaaagccacctacgaactgggtcgtgaatttctgccgatggaaattcagctgtcacgcctggtgggtcaaccgctgtgggacgtttcgcgtagttccaccggcaatctggttgaatggttcctgctgcgtaaagcgtatgaacgcaacgaagtggcaccgaataaaccggatgaacgtgaatatcagcgtcgcctgcgcgaaagttatgcaggcggttacgtgaaagaaccggaaaaaggtctgtgggaaggcctggtttatctggattttcgtgcgctgtacccgagcattatcattacgcataacgtttctccggacaccctgaatcgtgaaggctgccgcgaatatgatattgcgccggaagtgggtcacaaattttgtaaagatatcccgggcttcattccgagcctgctgaaacgtctgctggaagaacgccagaaaatcaaaacgaaaatgaaagaaacccaagatccgatcgaaaaaattctgctggactaccgtcagcgcgcgatcaaaattctggccaacagttattacggttattacggctatgcaaaagctcgctggtactgcaaagaatgtgcagaatccgttaccgcttggggtcgtaaatacatcgaattcgtctggaaagaactggaagaaaaattcggtttcaaagttctgtacatcgatacggacggtctgtacgcaaccatcccgggcggtaaaccggaagaaattaagaaaaaagccctggaatttgtggattacattaatgcaaaactgccgggcctgctggaactggaatatgaaggtttctacgtgcgtggctttttcgttaccaagaaaaaatatgccgtcattgacgaagaaggtaaagtgatcacccgcggcctggaaattgttcgtcgcgattggagtgaaattgccaaagaaacccaggcacgtgttctggaagcaattctgaaacatggtaacgtcgaagaagcggtcaaaatcgtgaaagaagttacggaaaaactgtctaactacgaaattccgccggaaaaactggccatctacgaacaaattacccgcccgctgcatgaatataaagcaatcggtccgcacgtcgcagtggcaaaacgtctggcagcacgcggcgttaaagtcaaaccgggtatggtcatcggctatattgtgctgcgtggtgatggcccgatcagcaaccgcgcaattctggctgaagaatacgatctgaaaaaacacaaatacgacgccgaatattacatcgaaaatcaggttctgccggctgtcctgcgtattctggaagcgtttggctatcgtaaagaagatctgcgctggcagaaaacccgtcaaacgggtctgacctcatggctgaatattaaaaaatcgtaa

SEQ ID NO: 486 - DNA, 2328 bp, Artificial Sequence
  Synthetic
atgatcctggacgtggactacattaccgaagacggcaaaccgattatccgcatcttcaaaaaagaaaacggcaaattcaaagtggaatatgatcgtaactttcgcccgtatatttacgctctgctgaaagatgacagccagatcgaagaagtccgcaaaattacggcggaacgtcatggtaaaatcgtgcgcatcatcgatgtggaaaaagttgagaaaaaatttctgggccgtccgattaccgtgtggcgcctgtatttcgaacatccgcaagatgttccggctatccgtgacaaagttcgcgaacacagtgcggtcatcgatatttttgaatatgacattccgttcgctaaacgctacctgatcgataaaggtctgattccgatggaaggcgacgaagaactgaaactgctggcctttgatattgaaacgctgtaccacgaaggtgaagaattcggtaaaggcccgattatcatgatctcctatgcagacgaagaagaagcgaaagtcatcacctggaagaaaattgatctgccgtatgtggaagtggttagctctgaacgtgaaatgatcaaacgctttctgaaaatcatccgcgaaaaagatccggacgttattatcacctataacggtgattcattcgacctgccgtacctggtgaaacgtgccgaaaaactgggcatcaaactgacgattggtcgtgacggctcggaaccgaaaatgcagcgcctgggtgatatgaccgcagtcgaaatcaaaggccgtattcattttgatctgtaccacgtgatcacccgcacgattaacctgccgacctatacgctggaagcggtttacgaagccattttcggtaaaccgaaagaaaaagtctatgccgacgaaatcgcagaagcttgggaaagtggcgaaaatctggaacgcgtggcaaaatattccatggaagatgcgaaagccacctacgaactgggtcgtgaatttctgccgatggaaattcagctgtcacgcctggtgggtcaaccgctgtgggacgtttcgcgtagttccaccggcaatctggttgaatggttcctgctgcgtaaagcgtatgaacgcaacgaagtggcaccgaataaaccggatgaacgtgaatatcagcgtcgcctgcgcgaaagttatgcaggcggttacgtgaaagaaccggaaaaaggtctgtgggaaggcctggtttatctggattttcgtgcgctgtacccgagcattatcattacgcataacgtttctccggacaccctgaatcgtgaaggctgccgcgaatatgatattgcgccggaagtgggtcacaaattttgtaaagatatcccgggcttcattccgagcctgctgaaacgtctgctggaagaacgccagaaaatcaaaacgaaaatgaaagaaacccaagatccgatcgaaaaaattctgctggactaccgtcagcgcgcgatcaaaattctggccaacagttattacggttattacggctatgcaaaagctcgctggtactgcaaagaatgtgcagaatccgttaccgcttggggtcgtaaatacatcgaattcgtctggaaagaactggaagaaaaattcggtttcaaagttctgtacatcgatacggacggtctgtacgcaaccatcccgggcggtaaaccggaagaaattaagaaaaaagccctggaatttgtggattacattaatgcaaaactgccgggcctgctggaactggaatatgaaggtttctacgtgcgtggctttttcgttaccaagaaaaaatatgccgtcattgacgaagaaggtaaagtgatcacccgcggcctggaaattgttcgtcgcgattggagtgaaattgccaaagaaacccaggcaaaagttctggaagcaatcctgaaacatggtaatgtcgaagaagcagtgaaaattgtcaaggaagtgacggaaaaactgtcgaagtatgaaatcccgccggaaaaactggtgatctacgaacaaattacccgcccgctgcatgaatataaagcgattggcccgcacgtggcagttgctaaacgtctggcagcccgcggtgtcaaagtgcgtccgggcatggtgatcggttatattgttctgcgtggcgatggtccgatcagtaaacgcgcgattctggccgaagaatttgatccgcgcaaacacaagtacgacgccgaatattacatcgaaaaccaggtgctgccggctgttctgcgtattctggaagcgttcggctatcgtaaagaagatctgcgctggcagaaaaccaagcaaacgggtctgaccgcatggctgaatgtgaaaaagaaataa

SEQ ID NO: 487 - DNA, 2328 bp, Artificial Sequence
  Synthetic
atgatcctggacgtggactacattaccgaagacggcaaaccgattatccgcatcttcaaaaaagaaaacggcaaattcaaagtggaatatgatcgtaactttcgcccgtatatttacgctctgctgaaagatgacagccagatcgaagaagtccgcaaaattacggcggaacgtcatggtaaaatcgtgcgcatcatcgatgtggaaaaagttgagaaaaaatttctgggccgtccgattaccgtgtggcgcctgtatttcgaacatccgcaagatgttccggctatccgtgacaaagttcgcgaacacagtgcggtcatcgatatttttgaatatgacattccgttcgctaaacgctacctgatcgataaaggtctgattccgatggaaggcgacgaagaactgaaactgctggcctttgatattgaaacgctgtaccacgaaggtgaagaattcggtaaaggcccgattatcatgatctcctatgcagacgaagaagaagcgaaagtcatcacctggaagaaaattgatctgccgtatgtggaagtggttagctctgaacgtgaaatgatcaaacgctttctgaaaatcatccgcgaaaaagatccggacgttattatcacctataacggtgattcattcgacctgccgtacctggtgaaacgtgccgaaaaactgggcatcaaactgacgattggtcgtgacggctcggaaccgaaaatgcagcgcctgggtgatatgaccgcagtcgaaatcaaaggccgtattcattttgatctgtaccacgtgatcacccgcacgattaacctgccgacctatacgctggaagcggtttacgaagccattttcggtaaaccgaaagaaaaagtctatgccgacgaaatcgcagaagcttgggaaagtggcgaaaatctggaacgcgtggcaaaatattccatggaagatgcgaaagccacctacgaactgggtcgtgaatttctgccgatggaaattcagctgtcacgcctggtgggtcaaccgctgtgggacgtttcgcgtagttccaccggcaatctggttgaatggttcctgctgcgtaaagcgtatgaacgcaacgaactggcgccgaataaaccggatgaaaaggaactggcacgtcgccgtggcggttatgcaggcggttacgtcaaagaaccggaacgtggcctgtgggataatattgtgtatctggactttcgcagtctgtacccgtccattatcattacccataacgttagtccggacacgctgaatcgcgaaggctgcaaagaatatgatgtggccccggaagttggtcacaagttctgtaaagactttccgggcttcatcccgtccctgctgggtgatctgctggaagaacgccagaagattaagcgtaagatgaaagcaaccgttgatccgctggaaaagaaactgctggactatcgccaacgtgcgatcaaaattctggccaacagctattacggctattacggttatgcgaaagcccgctggtactgccgtgaatgtgcagaatctgtgaccgcttggggccgcgaatatattgaaaccacgatccgtgaaatcgaagaaaagttcggtttcaaggttctgtacgctgataccgacggctttttcgcgacgatcccgggtgcagatgctgaaaccgtgaaaaagaaagctaaggaattcctgaagtacatcaacgcgaaactgccgggcctgctggaactggaatatgaaggcttctacgttcgtggctttttcgtcacgaagaaaaagtacgcggttatcgacgaagaaggcaaaattaccacgcgcggtctggaaatcgtgcgccgtgattggagtgaaattgccaaagaaacccaggcacgcgttctggaagcaatcctgcgtcatggtgacgtcgaagaagccgttcgcattgtcaaagatgtgacggaaaagctgtcgaaatatgaagtcccgccggaaaaactggtgatccatgaacaaattacccgtgaactgaaggattacaaagcgacgggcccgcacgttgcaattgctaaacgcctggcagcccgtggcatcaagattcgtccgggtaccgttatcagctatattgtcctgaaaggctctggtcgcatcggtgatcgtgctattccgtttgatgaattcgacccgacgaaacaccgttacgatgccgaatattacatcgaaaatcaggtgctgccggccgttgaacgcattctgaaagcatttggctataagaaagaagaactgcgctaccagaaaacccgtcaagtgggcctgggtgcgtggctgaagctgaaaggtaagaaataa

SEQ ID NO: 488 - DNA, 2322 bp, Artificial Sequence
  Synthetic
atgatcctggacgtggactacattaccgaagacggcaaaccgattatccgcatcttcaaaaaagaaaacggcaaattcaaagtggaatatgatcgtaactttcgcccgtatatttacgctctgctgaaagatgacagccagatcgaagaagtccgcaaaattacggcggaacgtcatggtaaaatcgtgcgcatcatcgatgtggaaaaagttgagaaaaaatttctgggccgtccgattaccgtgtggcgcctgtatttcgaacatccgcaagatgttccggctatccgtgacaaagttcgcgaacacagtgcggtcatcgatatttttgaatatgacattccgttcgctaaacgctacctgatcgataaaggtctgattccgatggaaggcgacgaagaactgaaactgctggcctttgatattgaaacgctgtaccacgaaggtgaagaattcggtaaaggcccgattatcatgatctcctatgcagacgaagaagaagcgaaagtcatcacctggaagaaaattgatctgccgtatgtggaagtggttagctctgaacgtgaaatgatcaaacgctttctgaaaatcatccgcgaaaaagatccggacgttattatcacctataacggtgattcattcgacctgccgtacctggtgaaacgtgccgaaaaactgggcatcaaactgacgattggtcgtgacggctcggaaccgaaaatgcagcgcctgggtgatatgaccgcagtcgaaatcaaaggccgtattcattttgatctgtaccacgtgatcacccgcacgattaacctgccgacctatacgctggaagcggtttacgaagccattttcggtaaaccgaaagaaaaagtctatgccgacgaaatcgcagaagcttgggaaagtggcgaaaatctggaacgcgtggcaaaatattccatggaagatgcgaaagccacctacgaactgggtcgtgaatttctgccgatggaaattcagctgtcacgcctggtgggtcaaccgctgtgggacgtttcgcgtagttccaccggcaatctggttgaatggttcctgctgcgtaaagcgtatgaacgcaacgaactggcgccgaataaaccggatgaaaaggaactggcacgtcgccgtggcggttatgcaggcggttacgtcaaagaaccggaacgtggcctgtgggataatattgtgtatctggactttcgcagtctgtacccgtccattatcattacccataacgttagtccggacacgctgaatcgcgaaggctgcaaagaatatgatgtggccccggaagttggtcacaagttctgtaaagactttccgggcttcatcccgtccctgctgggtgatctgctggaagaacgccagaagattaagcgtaagatgaaagcaaccgttgatccgctggaaaagaaactgctggactatcgccaacgtgcgatcaaaattctggccaacagctattacggctattacggttatgcgaaagcccgctggtactgccgtgaatgtgcagaatctgtgaccgcttggggccgcgaatatattgaaaccacgatccgtgaaatcgaagaaaagttcggtttcaaggttctgtacgctgataccgacggctttttcgcgacgatcccgggtgcagatgctgaaaccgtgaaaaagaaagctaaggaattcctgaagtacatcaacgcgaaactgccgggcctgctggaactggaatatgaaggcttctacgttcgtggctttttcgtcacgaagaaaaagtacgcggttatcgacgaagaaggcaaaattaccacgcgcggtctggaaatcgtgcgccgtgattggagtgaaattgccaaagaaacccaggcacgtgtcctggaagcaatcctgaaacatggtgatgtggaagaagcggttcgcattgtcaaagaagtgacggaaaagctgtcgaaatatgaagttccgccggaaaaactggtcatccatgaacaaattacccgcgatctgcgtgactacaaagccacgggtccgcacgtggcagttgcaaaacgtctggcagcccgtggcgtgaagattcgtccgggtaccgtgatcagttatattgttctgaaaggctccggtcgcatcggtgaccgtgctattccgtttgatgaattcgacccgacgaaacaccgttacgatgccgaatattacatcgaaaatcaggtcctgccggccgtggaacgcattctgaaagcatttggttatcgcaaggaagatctgcgttaccagaagaccaaacaagtcggcctgggtgcgtggctgaaagtgaaaaagtaa

SEQ ID NO: 489 - DNA, 2328 bp, Artificial Sequence
  Synthetic
atgatcctggacgtggactacattaccgaagacggcaaaccgattatccgcatcttcaaaaaagaaaacggcaaattcaaagtggaatatgatcgtaactttcgcccgtatatttacgctctgctgaaagatgacagccagatcgaagaagtccgcaaaattacggcggaacgtcatggtaaaatcgtgcgcatcatcgatgtggaaaaagttgagaaaaaatttctgggccgtccgattaccgtgtggcgcctgtatttcgaacatccgcaagatgttccggctatccgtgacaaagttcgcgaacacagtgcggtcatcgatatttttgaatatgacattccgttcgctaaacgctacctgatcgataaaggtctgattccgatggaaggcgacgaagaactgaaactgctggcctttgatattgaaacgctgtaccacgaaggtgaagaattcggtaaaggcccgattatcatgatctcctatgcagacgaagaagaagcgaaagtcatcacctggaagaaaattgatctgccgtatgtggaagtggttagctctgaacgtgaaatgatcaaacgctttctgaaaatcatccgcgaaaaagatccggacgttattatcacctataacggtgattcattcgacctgccgtacctggtgaaacgtgccgaaaaactgggcatcaaactgacgattggtcgtgacggctcggaaccgaaaatgcagcgcctgggtgatatgaccgcagtcgaaatcaaaggccgtattcattttgatctgtaccacgtgatcacccgcacgattaacctgccgacctatacgctggaagcggtttacgaagccattttcggtaaaccgaaagaaaaagtctatgccgacgaaatcgcagaagcttgggaaagtggcgaaaatctggaacgcgtggcaaaatattccatggaagatgcgaaagccacctacgaactgggtcgtgaatttctgccgatggaaattcagctgtcacgcctggtgggtcaaccgctgtgggacgtttcgcgtagttccaccggcaatctggttgaatggttcctgctgcgtaaagcgtatgaacgcaacgaactggcgccgaataaaccggatgaaaaggaactggcacgtcgccgtggcggttatgcaggcggttacgtcaaagaaccggaacgtggcctgtgggataatattgtgtatctggactttcgcagtctgtacccgtccattatcattacccataacgttagtccggacacgctgaatcgcgaaggctgcaaagaatatgatgtggccccggaagttggtcacaagttctgtaaagactttccgggcttcatcccgtccctgctgggtgatctgctggaagaacgccagaagattaagcgtaagatgaaagcaaccgttgatccgctggaaaagaaactgctggactatcgccaacgtgcgatcaaaattctggccaacagctattacggctattacggttatgcgaaagcccgctggtactgccgtgaatgtgcagaatctgtgaccgcttggggccgcgaatatattgaaaccacgatccgtgaaatcgaagaaaagttcggtttcaaggttctgtacgctgataccgacggctttttcgcgacgatcccgggtgcagatgctgaaaccgtgaaaaagaaagctaaggaattcctgaagtacatcaacgcgaaactgccgggcctgctggaactggaatatgaaggcttctacgttcgtggctttttcgtcacgaagaaaaagtacgcggttatcgacgaagaaggcaaaattaccacgcgcggtctggaaatcgtgcgccgtgattggagtgaaattgccaaagaaacccaggcacgtgtgctggaagctctgctgaaagatggcaatgttgaagaagcggtttccattgtcaaagaagtgacggaaaagctgggtaaatatgaagtcccgccggaaaaactggtgatccatgaacaaattacccgcgaactgaaggattacaaagcgacgggcccgcacgttgctatcgcgaaacgtctggcagcgcgtggcgtgaagattcgtccgggtaccgttatcagctatattgtcctgaaaggctctggtcgtatcggtgaccgcgcgattccgtttgatgaattcgacccgacgaaacatcgctacgatgcagaatattacatcgaaaaccaggttctgccggctgtcgaacgtattctgaaagcgtttggctatcgtgccgaagatctgcgctaccagaaaacccgtcaagtgggcctgggtgtttggctgcaaccgaaaggtaagaaataa

SEQ ID NO: 490 - DNA, 2325 bp, Artificial Sequence
  Synthetic
atgatcctggacgtggactacattaccgaagacggcaaaccgattatccgcatcttcaaaaaagaaaacggcaaattcaaagtggaatatgatcgtaactttcgcccgtatatttacgctctgctgaaagatgacagccagatcgaagaagtccgcaaaattacggcggaacgtcatggtaaaatcgtgcgcatcatcgatgtggaaaaagttgagaaaaaatttctgggccgtccgattaccgtgtggcgcctgtatttcgaacatccgcaagatgttccggctatccgtgacaaagttcgcgaacacagtgcggtcatcgatatttttgaatatgacattccgttcgctaaacgctacctgatcgataaaggtctgattccgatggaaggcgacgaagaactgaaactgctggcctttgatattgaaacgctgtaccacgaaggtgaagaattcggtaaaggcccgattatcatgatctcctatgcagacgaagaagaagcgaaagtcatcacctggaagaaaattgatctgccgtatgtggaagtggttagctctgaacgtgaaatgatcaaacgctttctgaaaatcatccgcgaaaaagatccggacgttattatcacctataacggtgattcattcgacctgccgtacctggtgaaacgtgccgaaaaactgggcatcaaactgacgattggtcgtgacggctcggaaccgaaaatgcagcgcctgggtgatatgaccgcagtcgaaatcaaaggccgtattcattttgatctgtaccacgtgatcacccgcacgattaacctgccgacctatacgctggaagcggtttacgaagccattttcggtaaaccgaaagaaaaagtctatgccgacgaaatcgcagaagcttgggaaagtggcgaaaatctggaacgcgtggcaaaatattccatggaagatgcgaaagccacctacgaactgggtcgtgaatttctgccgatggaaattcagctgtcacgcctggtgggtcaaccgctgtgggacgtttcgcgtagttccaccggcaatctggttgaatggttcctgctgcgtaaagcgtatgaacgcaacgaactggcgccgaataaaccggatgaaaaggaactggcacgtcgccgtggcggttatgcaggcggttacgtcaaagaaccggaacgtggcctgtgggataatattgtgtatctggactttcgcagtctgtacccgtccattatcattacccataacgttagtccggacacgctgaatcgcgaaggctgcaaagaatatgatgtggccccggaagttggtcacaagttctgtaaagactttccgggcttcatcccgtccctgctgggtgatctgctggaagaacgccagaagattaagcgtaagatgaaagcaaccgttgatccgctggaaaagaaactgctggactatcgccaacgtgcgatcaaaattctggccaacagctattacggctattacggttatgcgaaagcccgctggtactgccgtgaatgtgcagaatctgtgaccgcttggggccgcgaatatattgaaaccacgatccgtgaaatcgaagaaaagttcggtttcaaggttctgtacgctgataccgacggctttttcgcgacgatcccgggtgcagatgctgaaaccgtgaaaaagaaagctaaggaattcctgaagtacatcaacgcgaaactgccgggcctgctggaactggaatatgaaggcttctacgttcgtggctttttcgtcacgaagaaaaagtacgcggttatcgacgaagaaggcaaaattaccacgcgcggtctggaaatcgtgcgccgtgattggagtgaaattgccaaagaaacccaggcaaaggttctggaagcaattctgaaacatggtaacgtcgaagaagcggtcaagatcgtgaaagaagttaccgaaaaactgtcgaattatgaaattccggtcgaaaagctggtgatctacgaacaaattacgcgcccgctgaacgaatataaagccattggcccgcacgtggcagttgctaaacgtctggcggccaagggtatcaagattaaaccgggcatggtgattggttatgttgtcctgcgcggcgatggtccgatcagcaaacgtgcgatcgccatcgaagaattcgatggcaaaaagcataagtacgacgcagaatactacatcgaaaatcaggttctgccggccgtcgaacgtatcctgaaagcattcggttataagcgtgaagatctgcgctggcagaagaccaaacaagtgggcctgggtgcgtggctgaaagttaaaaagtcttaa

SEQ ID NO: 491 - DNA, 2328 bp, Artificial Sequence
  Synthetic
atgatcctggacgtggactacattaccgaagacggcaaaccgattatccgcatcttcaaaaaagaaaacggcaaattcaaagtggaatatgatcgtaactttcgcccgtatatttacgctctgctgaaagatgacagccagatcgaagaagtccgcaaaattacggcggaacgtcatggtaaaatcgtgcgcatcatcgatgtggaaaaagttgagaaaaaatttctgggccgtccgattaccgtgtggcgcctgtatttcgaacatccgcaagatgttccggctatccgtgacaaagttcgcgaacacagtgcggtcatcgatatttttgaatatgacattccgttcgctaaacgctacctgatcgataaaggtctgattccgatggaaggcgacgaagaactgaaactgctggcctttgatattgaaacgctgtaccacgaaggtgaagaattcggtaaaggcccgattatcatgatctcctatgcagacgaagaagaagcgaaagtcatcacctggaagaaaattgatctgccgtatgtggaagtggttagctctgaacgtgaaatgatcaaacgctttctgaaaatcatccgcgaaaaagatccggacgttattatcacctataacggtgattcattcgacctgccgtacctggtgaaacgtgccgaaaaactgggcatcaaactgacgattggtcgtgacggctcggaaccgaaaatgcagcgcctgggtgatatgaccgcagtcgaaatcaaaggccgtattcattttgatctgtaccacgtgatcacccgcacgattaacctgccgacctatacgctggaagcggtttacgaagccattttcggtaaaccgaaagaaaaagtctatgccgacgaaatcgcagaagcttgggaaagtggcgaaaatctggaacgcgtggcaaaatattccatggaagatgcgaaagccacctacgaactgggtcgtgaatttctgccgatggaaattcagctgtcacgcctggtgggtcaaccgctgtgggacgtttcgcgtagttccaccggcaatctggttgaatggttcctgctgcgtaaagcgtatgaacgcaacgaactggcgccgaataaaccggatgaaaaggaactggcacgtcgccgtggcggttatgcaggcggttacgtcaaagaaccggaacgtggcctgtgggataatattgtgtatctggactttcgcagtctgtacccgtccattatcattacccataacgttagtccggacacgctgaatcgcgaaggctgcaaagaatatgatgtggccccggaagttggtcacaagttctgtaaagactttccgggcttcatcccgtccctgctgggtgatctgctggaagaacgccagaagattaagcgtaagatgaaagcaaccgttgatccgctggaaaagaaactgctggactatcgccaacgtgcgatcaaaattctggccaacagctattacggctattacggttatgcgaaagcccgctggtactgccgtgaatgtgcagaatctgtgaccgcttggggccgcgaatatattgaaaccacgatccgtgaaatcgaagaaaagttcggtttcaaggttctgtacgctgataccgacggctttttcgcgacgatcccgggtgcagatgctgaaaccgtgaaaaagaaagctaaggaattcctgaagtacatcaacgcgaaactgccgggcctgctggaactggaatatgaaggcttctacgttcgtggctttttcgtcacgaagaaaaagtacgcggttatcgacgaagaaggcaaaattaccacgcgcggtctggaaatcgtgcgccgtgattggagtgaaattgccaaagaaacccaggcacgtgttctggaagcactgctgaaagatggtaatgtcgaagaagcagtgagtattgttaaagaagtcacggaaaaactgtccaagtatgaagtcccgccggaaaaactggtgattcatgaacaaatcacccgcgaactgaaagattacaaggcgacgggcccgcacgtggcaattgctaaacgtctggcagcgcgtggcgttaagatccgtccgggtaccgttattagctatatcgtcctgaaaggctctggtcgtattggtgaccgcgccatcccgtttgatgaattcgacccggctaaacaccgctacgatgcggaatattacattgaaaatcaggtcctgccggctgtggaacgtatcctgaaagcgtttggctatcgtaaggaagatctgcgctaccagaaaacccgtcaagtgggcctgggtgcgtggctgaaaccgaagggtaaaaagtaa

SEQ ID NO: 492 - DNA, 2328 bp, Artificial Sequence
  Synthetic
atgatcctggacgtggactacattaccgaagacggcaaaccgattatccgcatcttcaaaaaagaaaacggcaaattcaaagtggaatatgatcgtaactttcgcccgtatatttacgctctgctgaaagatgacagccagatcgaagaagtccgcaaaattacggcggaacgtcatggtaaaatcgtgcgcatcatcgatgtggaaaaagttgagaaaaaatttctgggccgtccgattaccgtgtggcgcctgtatttcgaacatccgcaagatgttccggctatccgtgacaaagttcgcgaacacagtgcggtcatcgatatttttgaatatgacattccgttcgctaaacgctacctgatcgataaaggtctgattccgatggaaggcgacgaagaactgaaactgctggcctttgatattgaaacgctgtaccacgaaggtgaagaattcggtaaaggcccgattatcatgatctcctatgcagacgaagaagaagcgaaagtcatcacctggaagaaaattgatctgccgtatgtggaagtggttagctctgaacgtgaaatgatcaaacgctttctgaaaatcatccgcgaaaaagatccggacgttattatcacctataacggtgattcattcgacctgccgtacctggtgaaacgtgccgaaaaactgggcatcaaactgacgattggtcgtgacggctcggaaccgaaaatgcagcgcctgggtgatatgaccgcagtcgaaatcaaaggccgtattcattttgatctgtaccacgtgatcacccgcacgattaacctgccgacctatacgctggaagcggtttacgaagccattttcggtaaaccgaaagaaaaagtctatgccgacgaaatcgcagaagcttgggaaagtggcgaaaatctggaacgcgtggcaaaatattccatggaagatgcgaaagccacctacgaactgggtcgtgaatttctgccgatggaaattcagctgtcacgcctggtgggtcaaccgctgtgggacgtttcgcgtagttccaccggcaatctggttgaatggttcctgctgcgtaaagcgtatgaacgcaacgaactggcgccgaataaaccggatgaaaaggaactggcacgtcgccgtggcggttatgcaggcggttacgtcaaagaaccggaacgtggcctgtgggataatattgtgtatctggactttcgcagtctgtacccgtccattatcattacccataacgttagtccggacacgctgaatcgcgaaggctgcaaagaatatgatgtggccccggaagttggtcacaagttctgtaaagactttccgggcttcatcccgtccctgctgggtgatctgctggaagaacgccagaagattaagcgtaagatgaaagcaaccgttgatccgctggaaaagaaactgctggactatcgccaacgtgcgatcaaaattctggccaacagctattacggctattacggttatgcgaaagcccgctggtactgccgtgaatgtgcagaatctgtgaccgcttggggccgcgaatatattgaaaccacgatccgtgaaatcgaagaaaagttcggtttcaaggttctgtacgctgataccgacggctttttcgcgacgatcccgggtgcagatgctgaaaccgtgaaaaagaaagctaaggaattcctgaagtacatcaacgcgaaactgccgggcctgctggaactggaatatgaaggcttctacgttcgtggctttttcgtcacgaagaaaaagtacgcggttatcgacgaagaaggcaaaattaccacgcgcggtctggaaatcgtgcgccgtgattggagtgaaattgccaaagaaacccaggcacgcgtcctggaagcaatcctgaaagatggtgacgtggaagaagccgtccgtattgtgaaagaagttacggaaaaactgtccaaatatgaagttccgccggaaaaactggtcatccatgaacaaattacccgcgaactgaaagattacaaagcgacgggcccgcacgtcgcaatcgctaaacgtctggcggcgcgtggcgtgaaaattcgtccgggtaccgtgatctcatatattgttctgaaaggctcgggtcgtatcggtgaccgcgctattccgtttgatgaattcgacccgaaaaaacacaaatacgatgcggaatactacatcgaaaaccaggttctgccggccgtcgaacgtattctgcgcgcatttggctaccgtaaagaagatctgcgttatcaaaaaaccaaacaagtgggtctgggtgcgtggctgaaaccgaaaggtaaaaaataa

SEQ ID NO: 493 - DNA, 2325 bp, Artificial Sequence
  Synthetic
atgatcctggacgtggactacattaccgaagacggcaaaccgattatccgcatcttcaaaaaagaaaacggcaaattcaaagtggaatatgatcgtaactttcgcccgtatatttacgctctgctgaaagatgacagccagatcgaagaagtccgcaaaattacggcggaacgtcatggtaaaatcgtgcgcatcatcgatgtggaaaaagttgagaaaaaatttctgggccgtccgattaccgtgtggcgcctgtatttcgaacatccgcaagatgttccggctatccgtgacaaagttcgcgaacacagtgcggtcatcgatatttttgaatatgacattccgttcgctaaacgctacctgatcgataaaggtctgattccgatggaaggcgacgaagaactgaaactgctggcctttgatattgaaacgctgtaccacgaaggtgaagaattcggtaaaggcccgattatcatgatctcctatgcagacgaagaagaagcgaaagtcatcacctggaagaaaattgatctgccgtatgtggaagtggttagctctgaacgtgaaatgatcaaacgctttctgaaaatcatccgcgaaaaagatccggacgttattatcacctataacggtgattcattcgacctgccgtacctggtgaaacgtgccgaaaaactgggcatcaaactgacgattggtcgtgacggctcggaaccgaaaatgcagcgcctgggtgatatgaccgcagtcgaaatcaaaggccgtattcattttgatctgtaccacgtgatcacccgcacgattaacctgccgacctatacgctggaagcggtttacgaagccattttcggtaaaccgaaagaaaaagtctatgccgacgaaatcgcagaagcttgggaaagtggcgaaaatctggaacgcgtggcaaaatattccatggaagatgcgaaagccacctacgaactgggtcgtgaatttctgccgatggaaattcagctgtcacgcctggtgggtcaaccgctgtgggacgtttcgcgtagttccaccggcaatctggttgaatggttcctgctgcgtaaagcgtatgaacgcaacgaactggcgccgaataaaccggatgaaaaggaactggcacgtcgccgtggcggttatgcaggcggttacgtcaaagaaccggaacgtggcctgtgggataatattgtgtatctggactttcgcagtctgtacccgtccattatcattacccataacgttagtccggacacgctgaatcgcgaaggctgcaaagaatatgatgtggccccggaagttggtcacaagttctgtaaagactttccgggcttcatcccgtccctgctgggtgatctgctggaagaacgccagaagattaagcgtaagatgaaagcaaccgttgatccgctggaaaagaaactgctggactatcgccaacgtgcgatcaaaattctggccaacagctattacggctattacggttatgcgaaagcccgctggtactgccgtgaatgtgcagaatctgtgaccgcttggggccgcgaatatattgaaaccacgatccgtgaaatcgaagaaaagttcggtttcaaggttctgtacgctgataccgacggctttttcgcgacgatcccgggtgcagatgctgaaaccgtgaaaaagaaagctaaggaattcctgaagtacatcaacgcgaaactgccgggcctgctggaactggaatatgaaggcttctacgttcgtggctttttcgtcacgaagaaaaagtacgcggttatcgacgaagaaggcaaaattaccacgcgcggtctggaaatcgtgcgccgtgattggagtgaaattgccaaagaaacccaggcacgtgttctggaagcaattctgaaacatggtaacgtcgaagaagcggtcaaaatcgtgaaagaagttacggaaaaactgtctaactacgaaattccgccggaaaaactggccatctacgaacaaattacccgcccgctgcatgaatataaagcaatcggtccgcacgtcgcagtggcaaaacgtctggcagcacgcggcgttaaagtcaaaccgggtatggtcatcggctatattgtgctgcgtggtgatggcccgatcagcaaccgcgcaattctggctgaagaatacgatctgaaaaaacacaaatacgacgccgaatattacatcgaaaatcaggttctgccggctgtcctgcgtattctggaagcgtttggctatcgtaaagaagatctgcgctggcagaaaacccgtcaaacgggtctgacctcatggctgaatattaaaaaatcgtaa

SEQ ID NO: 494 - DNA, 2325 bp, Artificial Sequence
  Synthetic
atgatcctggacgtggactacattaccgaagacggcaaaccgattatccgcatcttcaaaaaagaaaacggcaaattcaaagtggaatatgatcgtaactttcgcccgtatatttacgctctgctgaaagatgacagccagatcgaagaagtccgcaaaattacggcggaacgtcatggtaaaatcgtgcgcatcatcgatgtggaaaaagttgagaaaaaatttctgggccgtccgattaccgtgtggcgcctgtatttcgaacatccgcaagatgttccggctatccgtgacaaagttcgcgaacacagtgcggtcatcgatatttttgaatatgacattccgttcgctaaacgctacctgatcgataaaggtctgattccgatggaaggcgacgaagaactgaaactgctggcctttgatattgaaacgctgtaccacgaaggtgaagaattcggtaaaggcccgattatcatgatctcctatgcagacgaagaagaagcgaaagtcatcacctggaagaaaattgatctgccgtatgtggaagtggttagctctgaacgtgaaatgatcaaacgctttctgaaaatcatccgcgaaaaagatccggacgttattatcacctataacggtgattcattcgacctgccgtacctggtgaaacgtgccgaaaaactgggcatcaaactgacgattggtcgtgacggctcggaaccgaaaatgcagcgcctgggtgatatgaccgcagtcgaaatcaaaggccgtattcattttgatctgtaccacgtgatcacccgcacgattaacctgccgacctatacgctggaagcggtttacgaagccattttcggtaaaccgaaagaaaaagtctatgccgacgaaatcgcagaagcttgggaaagtggcgaaaatctggaacgcgtggcaaaatattccatggaagatgcgaaagccacctacgaactgggtcgtgaatttctgccgatggaaattcagctgtcacgcctggtgggtcaaccgctgtgggacgtttcgcgtagttccaccggcaatctggttgaatggttcctgctgcgtaaagcgtatgaacgcaacgaactggcgccgaataaaccggatgaaaaggaactggcacgtcgccgtggcggttatgcaggcggttacgtcaaagaaccggaacgtggcctgtgggataatattgtgtatctggactttcgcagtctgtacccgtccattatcattacccataacgttagtccggacacgctgaatcgcgaaggctgcaaagaatatgatgtggccccggaagttggtcacaagttctgtaaagactttccgggcttcatcccgtccctgctgggtgatctgctggaagaacgccagaagattaagcgtaagatgaaagcaaccgttgatccgctggaaaagaaactgctggactatcgccaacgtgcgatcaaaattctggccaacagctattacggctattacggttatgcgaaagcccgctggtactgccgtgaatgtgcagaatctgtgaccgcttggggccgcgaatatattgaaaccacgatccgtgaaatcgaagaaaagttcggtttcaaggttctgtacgctgataccgacggctttttcgcgacgatcccgggtgcagatgctgaaaccgtgaaaaagaaagctaaggaattcctgaagtacatcaacgcgaaactgccgggcctgctggaactggaatatgaaggcttctacgttcgtggctttttcgtcacgaagaaaaagtacgcggttatcgacgaagaaggcaaaattaccacgcgcggtctggaaatcgtgcgccgtgattggagtgaaattgccaaagaaacccaggcaaaagttctggaagcaatcctgaaacatggtaatgtcgaagaagcagtgaaaattgtcaaggaagtgacggaaaaactgtcgaagtatgaaatcccgccggaaaaactggtgatctacgaacaaattacccgcccgctgcatgaatataaagcgattggcccgcacgtggcagttgctaaacgtctggcagcccgcggtgtcaaagtgcgtccgggcatggtgatcggttatattgttctgcgtggcgatggtccgatcagtaaacgcgcgattctggccgaagaatttgatccgcgcaaacacaagtacgacgccgaatattacatcgaaaaccaggtgctgccggctgttctgcgtattctggaagcgttcggctatcgtaaagaagatctgcgctggcagaaaaccaagcaaacgggtctgaccgcatggctgaatgtgaaaaagaaataa

SEQ ID NO: 495 - DNA, 2328 bp, Artificial Sequence
  Synthetic
atgatcctggacgtggactacattaccgaagacggcaaaccgattatccgcatcttcaaaaaagaaaacggcaaattcaaagtggaatatgatcgtaactttcgcccgtatatttacgctctgctgaaagatgacagccagatcgaagaagtccgcaaaattacggcggaacgtcatggtaaaatcgtgcgcatcatcgatgtggaaaaagttgagaaaaaatttctgggccgtccgattaccgtgtggcgcctgtatttcgaacatccgcaagatgttccggctatccgtgacaaagttcgcgaacacagtgcggtcatcgatatttttgaatatgacattccgttcgctaaacgctacctgatcgataaaggtctgattccgatggaaggcgacgaagaactgaaactgctggcctttgatattgaaacgctgtaccacgaaggtgaagaattcggtaaaggcccgattatcatgatctcctatgcagacgaagaagaagcgaaagtcatcacctggaagaaaattgatctgccgtatgtggaagtggttagctctgaacgtgaaatgatcaaacgctttctgaaaatcatccgcgaaaaagatccggacgttattatcacctataacggtgattcattcgacctgccgtacctggtgaaacgtgccgaaaaactgggcatcaaactgacgattggtcgtgacggctcggaaccgaaaatgcagcgcctgggtgatatgaccgcagtcgaaatcaaaggccgtattcattttgatctgtaccacgtgatcacccgcacgattaacctgccgacctatacgctggaagcggtttacgaagccattttcggtaaaccgaaagaaaaagtctatgccgacgaaatcgcagaagcttgggaaagtggcgaaaatctggaacgcgtggcaaaatattccatggaagatgcgaaagccacctacgaactgggtcgtgaatttctgccgatggaaattcagctgtcacgcctggtgggtcaaccgctgtgggacgtttcgcgtagttccaccggcaatctggttgaatggttcctgctgcgtaaagcgtatgaacgcaacgaaattgcgccgaataaaccggatgaacgtgaactggcacgtcgccgtggcggttatgcaggcggttacgttaaagaaccggaacgcggcctgtgggataatatcgtctatctggactttatgagtctgtacccgtccattatcattacccataacgttagtccggacacgttcaatcgtgaaggctgcaaagaatatgataccgccccgcaggttggtcacaagttttgtaaagacgtccaaggcttcattccgagtctgctgggtgccctgctggatgaacgccagaaaatcaagaaacgtatgaaggcatccattgatccgctggaaaagaaactgctggactatcgccaaaaggcgatcaaaattctggccaactcatattacggctattacggttatgcacgcgctcgttggtactgcaaagaatgtgcagaatcggtgaccgcttggggccgtgattatattgaaaccacgatccacgaaattgaagaacgctttggtttcaaagttctgtacgctgataccgacggctttttcgcgacgatcccgggtgcggatgccgaaaccgtgaagaaaaaggctaaggaattcctgaagtacatcaacgcgaaactgccgggcctgctggaactggaatatgaaggcttctacgtccgtggctttttcgtgaccaaaaagaaatacgcggttatcgacgaagaaggcaaaattaccacgcgcggtctggaaatcgtgcgccgtgattggagtgaaattgccaaagaaacccaggcacgcgttctggaagcaatcctgcgtcatggtgacgtcgaagaagccgttcgcattgtcaaagatgtgacggaaaagctgtcgaaatatgaagtcccgccggaaaaactggtgatccatgaacaaattacccgtgaactgaaggattacaaagcgacgggcccgcacgttgcaattgctaaacgcctggcagcccgtggcatcaagattcgtccgggtaccgttatcagctatattgtcctgaaaggctctggtcgcatcggtgatcgtgctattccgtttgatgaattcgacccgacgaaacaccgttacgatgccgaatattacatcgaaaatcaggtgctgccggccgttgaacgcattctgaaagcatttggctataagaaagaagaactgcgctaccagaaaacccgtcaagtgggcctgggtgcgtggctgaagctgaaaggtaagaaataa

SEQ ID NO: 496 - DNA, 2322 bp, Artificial Sequence
  Synthetic
atgatcctggacgtggactacattaccgaagacggcaaaccgattatccgcatcttcaaaaaagaaaacggcaaattcaaagtggaatatgatcgtaactttcgcccgtatatttacgctctgctgaaagatgacagccagatcgaagaagtccgcaaaattacggcggaacgtcatggtaaaatcgtgcgcatcatcgatgtggaaaaagttgagaaaaaatttctgggccgtccgattaccgtgtggcgcctgtatttcgaacatccgcaagatgttccggctatccgtgacaaagttcgcgaacacagtgcggtcatcgatatttttgaatatgacattccgttcgctaaacgctacctgatcgataaaggtctgattccgatggaaggcgacgaagaactgaaactgctggcctttgatattgaaacgctgtaccacgaaggtgaagaattcggtaaaggcccgattatcatgatctcctatgcagacgaagaagaagcgaaagtcatcacctggaagaaaattgatctgccgtatgtggaagtggttagctctgaacgtgaaatgatcaaacgctttctgaaaatcatccgcgaaaaagatccggacgttattatcacctataacggtgattcattcgacctgccgtacctggtgaaacgtgccgaaaaactgggcatcaaactgacgattggtcgtgacggctcggaaccgaaaatgcagcgcctgggtgatatgaccgcagtcgaaatcaaaggccgtattcattttgatctgtaccacgtgatcacccgcacgattaacctgccgacctatacgctggaagcggtttacgaagccattttcggtaaaccgaaagaaaaagtctatgccgacgaaatcgcagaagcttgggaaagtggcgaaaatctggaacgcgtggcaaaatattccatggaagatgcgaaagccacctacgaactgggtcgtgaatttctgccgatggaaattcagctgtcacgcctggtgggtcaaccgctgtgggacgtttcgcgtagttccaccggcaatctggttgaatggttcctgctgcgtaaagcgtatgaacgcaacgaaattgcgccgaataaaccggatgaacgtgaactggcacgtcgccgtggcggttatgcaggcggttacgttaaagaaccggaacgcggcctgtgggataatatcgtctatctggactttatgagtctgtacccgtccattatcattacccataacgttagtccggacacgttcaatcgtgaaggctgcaaagaatatgataccgccccgcaggttggtcacaagttttgtaaagacgtccaaggcttcattccgagtctgctgggtgccctgctggatgaacgccagaaaatcaagaaacgtatgaaggcatccattgatccgctggaaaagaaactgctggactatcgccaaaaggcgatcaaaattctggccaactcatattacggctattacggttatgcacgcgctcgttggtactgcaaagaatgtgcagaatcggtgaccgcttggggccgtgattatattgaaaccacgatccacgaaattgaagaacgctttggtttcaaagttctgtacgctgataccgacggctttttcgcgacgatcccgggtgcggatgccgaaaccgtgaagaaaaaggctaaggaattcctgaagtacatcaacgcgaaactgccgggcctgctggaactggaatatgaaggcttctacgtccgtggctttttcgtgaccaaaaagaaatacgcggttatcgacgaagaaggcaaaattaccacgcgcggtctggaaatcgtgcgccgtgattggagtgaaattgccaaagaaacccaggcacgtgtcctggaagcaatcctgaaacatggtgatgtggaagaagcggttcgcattgtcaaagaagtgacggaaaagctgtcgaaatatgaagttccgccggaaaaactggtcatccatgaacaaattacccgcgatctgcgtgactacaaagccacgggtccgcacgtggcagttgcaaaacgtctggcagcccgtggcgtgaagattcgtccgggtaccgtgatcagttatattgttctgaaaggctccggtcgcatcggtgaccgtgctattccgtttgatgaattcgacccgacgaaacaccgttacgatgccgaatattacatcgaaaatcaggtcctgccggccgtggaacgcattctgaaagcatttggttatcgcaaggaagatctgcgttaccagaagaccaaacaagtcggcctgggtgcgtggctgaaagtgaaaaagtaa

SEQ ID NO: 497 - DNA, 2328 bp, Artificial Sequence
  Synthetic
atgatcctggacgtggactacattaccgaagacggcaaaccgattatccgcatcttcaaaaaagaaaacggcaaattcaaagtggaatatgatcgtaactttcgcccgtatatttacgctctgctgaaagatgacagccagatcgaagaagtccgcaaaattacggcggaacgtcatggtaaaatcgtgcgcatcatcgatgtggaaaaagttgagaaaaaatttctgggccgtccgattaccgtgtggcgcctgtatttcgaacatccgcaagatgttccggctatccgtgacaaagttcgcgaacacagtgcggtcatcgatatttttgaatatgacattccgttcgctaaacgctacctgatcgataaaggtctgattccgatggaaggcgacgaagaactgaaactgctggcctttgatattgaaacgctgtaccacgaaggtgaagaattcggtaaaggcccgattatcatgatctcctatgcagacgaagaagaagcgaaagtcatcacctggaagaaaattgatctgccgtatgtggaagtggttagctctgaacgtgaaatgatcaaacgctttctgaaaatcatccgcgaaaaagatccggacgttattatcacctataacggtgattcattcgacctgccgtacctggtgaaacgtgccgaaaaactgggcatcaaactgacgattggtcgtgacggctcggaaccgaaaatgcagcgcctgggtgatatgaccgcagtcgaaatcaaaggccgtattcattttgatctgtaccacgtgatcacccgcacgattaacctgccgacctatacgctggaagcggtttacgaagccattttcggtaaaccgaaagaaaaagtctatgccgacgaaatcgcagaagcttgggaaagtggcgaaaatctggaacgcgtggcaaaatattccatggaagatgcgaaagccacctacgaactgggtcgtgaatttctgccgatggaaattcagctgtcacgcctggtgggtcaaccgctgtgggacgtttcgcgtagttccaccggcaatctggttgaatggttcctgctgcgtaaagcgtatgaacgcaacgaaattgcgccgaataaaccggatgaacgtgaactggcacgtcgccgtggcggttatgcaggcggttacgttaaagaaccggaacgcggcctgtgggataatatcgtctatctggactttatgagtctgtacccgtccattatcattacccataacgttagtccggacacgttcaatcgtgaaggctgcaaagaatatgataccgccccgcaggttggtcacaagttttgtaaagacgtccaaggcttcattccgagtctgctgggtgccctgctggatgaacgccagaaaatcaagaaacgtatgaaggcatccattgatccgctggaaaagaaactgctggactatcgccaaaaggcgatcaaaattctggccaactcatattacggctattacggttatgcacgcgctcgttggtactgcaaagaatgtgcagaatcggtgaccgcttggggccgtgattatattgaaaccacgatccacgaaattgaagaacgctttggtttcaaagttctgtacgctgataccgacggctttttcgcgacgatcccgggtgcggatgccgaaaccgtgaagaaaaaggctaaggaattcctgaagtacatcaacgcgaaactgccgggcctgctggaactggaatatgaaggcttctacgtccgtggctttttcgtgaccaaaaagaaatacgcggttatcgacgaagaaggcaaaattaccacgcgcggtctggaaatcgtgcgccgtgattggagtgaaattgccaaagaaacccaggcacgtgtgctggaagctctgctgaaagatggcaatgttgaagaagcggtttccattgtcaaagaagtgacggaaaagctgggtaaatatgaagtcccgccggaaaaactggtgatccatgaacaaattacccgcgaactgaaggattacaaagcgacgggcccgcacgttgctatcgcgaaacgtctggcagcgcgtggcgtgaagattcgtccgggtaccgttatcagctatattgtcctgaaaggctctggtcgtatcggtgaccgcgcgattccgtttgatgaattcgacccgacgaaacatcgctacgatgcagaatattacatcgaaaaccaggttctgccggctgtcgaacgtattctgaaagcgtttggctatcgtgccgaagatctgcgctaccagaaaacccgtcaagtgggcctgggtgtttggctgcaaccgaaaggtaagaaataa

SEQ ID NO: 498 - DNA, 2325 bp, Artificial Sequence
  Synthetic
atgatcctggacgtggactacattaccgaagacggcaaaccgattatccgcatcttcaaaaaagaaaacggcaaattcaaagtggaatatgatcgtaactttcgcccgtatatttacgctctgctgaaagatgacagccagatcgaagaagtccgcaaaattacggcggaacgtcatggtaaaatcgtgcgcatcatcgatgtggaaaaagttgagaaaaaatttctgggccgtccgattaccgtgtggcgcctgtatttcgaacatccgcaagatgttccggctatccgtgacaaagttcgcgaacacagtgcggtcatcgatatttttgaatatgacattccgttcgctaaacgctacctgatcgataaaggtctgattccgatggaaggcgacgaagaactgaaactgctggcctttgatattgaaacgctgtaccacgaaggtgaagaattcggtaaaggcccgattatcatgatctcctatgcagacgaagaagaagcgaaagtcatcacctggaagaaaattgatctgccgtatgtggaagtggttagctctgaacgtgaaatgatcaaacgctttctgaaaatcatccgcgaaaaagatccggacgttattatcacctataacggtgattcattcgacctgccgtacctggtgaaacgtgccgaaaaactgggcatcaaactgacgattggtcgtgacggctcggaaccgaaaatgcagcgcctgggtgatatgaccgcagtcgaaatcaaaggccgtattcattttgatctgtaccacgtgatcacccgcacgattaacctgccgacctatacgctggaagcggtttacgaagccattttcggtaaaccgaaagaaaaagtctatgccgacgaaatcgcagaagcttgggaaagtggcgaaaatctggaacgcgtggcaaaatattccatggaagatgcgaaagccacctacgaactgggtcgtgaatttctgccgatggaaattcagctgtcacgcctggtgggtcaaccgctgtgggacgtttcgcgtagttccaccggcaatctggttgaatggttcctgctgcgtaaagcgtatgaacgcaacgaaattgcgccgaataaaccggatgaacgtgaactggcacgtcgccgtggcggttatgcaggcggttacgttaaagaaccggaacgcggcctgtgggataatatcgtctatctggactttatgagtctgtacccgtccattatcattacccataacgttagtccggacacgttcaatcgtgaaggctgcaaagaatatgataccgccccgcaggttggtcacaagttttgtaaagacgtccaaggcttcattccgagtctgctgggtgccctgctggatgaacgccagaaaatcaagaaacgtatgaaggcatccattgatccgctggaaaagaaactgctggactatcgccaaaaggcgatcaaaattctggccaactcatattacggctattacggttatgcacgcgctcgttggtactgcaaagaatgtgcagaatcggtgaccgcttggggccgtgattatattgaaaccacgatccacgaaattgaagaacgctttggtttcaaagttctgtacgctgataccgacggctttttcgcgacgatcccgggtgcggatgccgaaaccgtgaagaaaaaggctaaggaattcctgaagtacatcaacgcgaaactgccgggcctgctggaactggaatatgaaggcttctacgtccgtggctttttcgtgaccaaaaagaaatacgcggttatcgacgaagaaggcaaaattaccacgcgcggtctggaaatcgtgcgccgtgattggagtgaaattgccaaagaaacccaggcaaaggttctggaagcaattctgaaacatggtaacgtcgaagaagcggtcaagatcgtgaaagaagttaccgaaaaactgtcgaattatgaaattccggtcgaaaagctggtgatctacgaacaaattacgcgcccgctgaacgaatataaagccattggcccgcacgtggcagttgctaaacgtctggcggccaagggtatcaagattaaaccgggcatggtgattggttatgttgtcctgcgcggcgatggtccgatcagcaaacgtgcgatcgccatcgaagaattcgatggcaaaaagcataagtacgacgcagaatactacatcgaaaatcaggttctgccggccgtcgaacgtatcctgaaagcattcggttataagcgtgaagatctgcgctggcagaagaccaaacaagtgggcctgggtgcgtggctgaaagttaaaaagtcttaa

SEQ ID NO: 499 - DNA, 2328 bp, Artificial Sequence
  Synthetic
atgatcctggacgtggactacattaccgaagacggcaaaccgattatccgcatcttcaaaaaagaaaacggcaaattcaaagtggaatatgatcgtaactttcgcccgtatatttacgctctgctgaaagatgacagccagatcgaagaagtccgcaaaattacggcggaacgtcatggtaaaatcgtgcgcatcatcgatgtggaaaaagttgagaaaaaatttctgggccgtccgattaccgtgtggcgcctgtatttcgaacatccgcaagatgttccggctatccgtgacaaagttcgcgaacacagtgcggtcatcgatatttttgaatatgacattccgttcgctaaacgctacctgatcgataaaggtctgattccgatggaaggcgacgaagaactgaaactgctggcctttgatattgaaacgctgtaccacgaaggtgaagaattcggtaaaggcccgattatcatgatctcctatgcagacgaagaagaagcgaaagtcatcacctggaagaaaattgatctgccgtatgtggaagtggttagctctgaacgtgaaatgatcaaacgctttctgaaaatcatccgcgaaaaagatccggacgttattatcacctataacggtgattcattcgacctgccgtacctggtgaaacgtgccgaaaaactgggcatcaaactgacgattggtcgtgacggctcggaaccgaaaatgcagcgcctgggtgatatgaccgcagtcgaaatcaaaggccgtattcattttgatctgtaccacgtgatcacccgcacgattaacctgccgacctatacgctggaagcggtttacgaagccattttcggtaaaccgaaagaaaaagtctatgccgacgaaatcgcagaagcttgggaaagtggcgaaaatctggaacgcgtggcaaaatattccatggaagatgcgaaagccacctacgaactgggtcgtgaatttctgccgatggaaattcagctgtcacgcctggtgggtcaaccgctgtgggacgtttcgcgtagttccaccggcaatctggttgaatggttcctgctgcgtaaagcgtatgaacgcaacgaaattgcgccgaataaaccggatgaacgtgaactggcacgtcgccgtggcggttatgcaggcggttacgttaaagaaccggaacgcggcctgtgggataatatcgtctatctggactttatgagtctgtacccgtccattatcattacccataacgttagtccggacacgttcaatcgtgaaggctgcaaagaatatgataccgccccgcaggttggtcacaagttttgtaaagacgtccaaggcttcattccgagtctgctgggtgccctgctggatgaacgccagaaaatcaagaaacgtatgaaggcatccattgatccgctggaaaagaaactgctggactatcgccaaaaggcgatcaaaattctggccaactcatattacggctattacggttatgcacgcgctcgttggtactgcaaagaatgtgcagaatcggtgaccgcttggggccgtgattatattgaaaccacgatccacgaaattgaagaacgctttggtttcaaagttctgtacgctgataccgacggctttttcgcgacgatcccgggtgcggatgccgaaaccgtgaagaaaaaggctaaggaattcctgaagtacatcaacgcgaaactgccgggcctgctggaactggaatatgaaggcttctacgtccgtggctttttcgtgaccaaaaagaaatacgcggttatcgacgaagaaggcaaaattaccacgcgcggtctggaaatcgtgcgccgtgattggagtgaaattgccaaagaaacccaggcacgtgttctggaagcactgctgaaagatggtaatgtcgaagaagcagtgagtattgttaaagaagtcacggaaaaactgtccaagtatgaagtcccgccggaaaaactggtgattcatgaacaaatcacccgcgaactgaaagattacaaggcgacgggcccgcacgtggcaattgctaaacgtctggcagcgcgtggcgttaagatccgtccgggtaccgttattagctatatcgtcctgaaaggctctggtcgtattggtgaccgcgccatcccgtttgatgaattcgacccggctaaacaccgctacgatgcggaatattacattgaaaatcaggtcctgccggctgtggaacgtatcctgaaagcgtttggctatcgtaaggaagatctgcgctaccagaaaacccgtcaagtgggcctgggtgcgtggctgaaaccgaagggtaaaaagtaa

SEQ ID NO: 500 - DNA, 2328 bp, Artificial Sequence
  Synthetic
atgatcctggacgtggactacattaccgaagacggcaaaccgattatccgcatcttcaaaaaagaaaacggcaaattcaaagtggaatatgatcgtaactttcgcccgtatatttacgctctgctgaaagatgacagccagatcgaagaagtccgcaaaattacggcggaacgtcatggtaaaatcgtgcgcatcatcgatgtggaaaaagttgagaaaaaatttctgggccgtccgattaccgtgtggcgcctgtatttcgaacatccgcaagatgttccggctatccgtgacaaagttcgcgaacacagtgcggtcatcgatatttttgaatatgacattccgttcgctaaacgctacctgatcgataaaggtctgattccgatggaaggcgacgaagaactgaaactgctggcctttgatattgaaacgctgtaccacgaaggtgaagaattcggtaaaggcccgattatcatgatctcctatgcagacgaagaagaagcgaaagtcatcacctggaagaaaattgatctgccgtatgtggaagtggttagctctgaacgtgaaatgatcaaacgctttctgaaaatcatccgcgaaaaagatccggacgttattatcacctataacggtgattcattcgacctgccgtacctggtgaaacgtgccgaaaaactgggcatcaaactgacgattggtcgtgacggctcggaaccgaaaatgcagcgcctgggtgatatgaccgcagtcgaaatcaaaggccgtattcattttgatctgtaccacgtgatcacccgcacgattaacctgccgacctatacgctggaagcggtttacgaagccattttcggtaaaccgaaagaaaaagtctatgccgacgaaatcgcagaagcttgggaaagtggcgaaaatctggaacgcgtggcaaaatattccatggaagatgcgaaagccacctacgaactgggtcgtgaatttctgccgatggaaattcagctgtcacgcctggtgggtcaaccgctgtgggacgtttcgcgtagttccaccggcaatctggttgaatggttcctgctgcgtaaagcgtatgaacgcaacgaaattgcgccgaataaaccggatgaacgtgaactggcacgtcgccgtggcggttatgcaggcggttacgttaaagaaccggaacgcggcctgtgggataatatcgtctatctggactttatgagtctgtacccgtccattatcattacccataacgttagtccggacacgttcaatcgtgaaggctgcaaagaatatgataccgccccgcaggttggtcacaagttttgtaaagacgtccaaggcttcattccgagtctgctgggtgccctgctggatgaacgccagaaaatcaagaaacgtatgaaggcatccattgatccgctggaaaagaaactgctggactatcgccaaaaggcgatcaaaattctggccaactcatattacggctattacggttatgcacgcgctcgttggtactgcaaagaatgtgcagaatcggtgaccgcttggggccgtgattatattgaaaccacgatccacgaaattgaagaacgctttggtttcaaagttctgtacgctgataccgacggctttttcgcgacgatcccgggtgcggatgccgaaaccgtgaagaaaaaggctaaggaattcctgaagtacatcaacgcgaaactgccgggcctgctggaactggaatatgaaggcttctacgtccgtggctttttcgtgaccaaaaagaaatacgcggttatcgacgaagaaggcaaaattaccacgcgcggtctggaaatcgtgcgccgtgattggagtgaaattgccaaagaaacccaggcacgcgtcctggaagcaatcctgaaagatggtgacgtggaagaagccgtccgtattgtgaaagaagttacggaaaaactgtccaaatatgaagttccgccggaaaaactggtcatccatgaacaaattacccgcgaactgaaagattacaaagcgacgggcccgcacgtcgcaatcgctaaacgtctggcggcgcgtggcgtgaaaattcgtccgggtaccgtgatctcatatattgttctgaaaggctcgggtcgtatcggtgaccgcgctattccgtttgatgaattcgacccgaaaaaacacaaatacgatgcggaatactacatcgaaaaccaggttctgccggccgtcgaacgtattctgcgcgcatttggctaccgtaaagaagatctgcgttatcaaaaaaccaaacaagtgggtctgggtgcgtggctgaaaccgaaaggtaaaaaataa

SEQ ID NO: 501 - DNA, 2325 bp, Artificial Sequence
  Synthetic
atgatcctggacgtggactacattaccgaagacggcaaaccgattatccgcatcttcaaaaaagaaaacggcaaattcaaagtggaatatgatcgtaactttcgcccgtatatttacgctctgctgaaagatgacagccagatcgaagaagtccgcaaaattacggcggaacgtcatggtaaaatcgtgcgcatcatcgatgtggaaaaagttgagaaaaaatttctgggccgtccgattaccgtgtggcgcctgtatttcgaacatccgcaagatgttccggctatccgtgacaaagttcgcgaacacagtgcggtcatcgatatttttgaatatgacattccgttcgctaaacgctacctgatcgataaaggtctgattccgatggaaggcgacgaagaactgaaactgctggcctttgatattgaaacgctgtaccacgaaggtgaagaattcggtaaaggcccgattatcatgatctcctatgcagacgaagaagaagcgaaagtcatcacctggaagaaaattgatctgccgtatgtggaagtggttagctctgaacgtgaaatgatcaaacgctttctgaaaatcatccgcgaaaaagatccggacgttattatcacctataacggtgattcattcgacctgccgtacctggtgaaacgtgccgaaaaactgggcatcaaactgacgattggtcgtgacggctcggaaccgaaaatgcagcgcctgggtgatatgaccgcagtcgaaatcaaaggccgtattcattttgatctgtaccacgtgatcacccgcacgattaacctgccgacctatacgctggaagcggtttacgaagccattttcggtaaaccgaaagaaaaagtctatgccgacgaaatcgcagaagcttgggaaagtggcgaaaatctggaacgcgtggcaaaatattccatggaagatgcgaaagccacctacgaactgggtcgtgaatttctgccgatggaaattcagctgtcacgcctggtgggtcaaccgctgtgggacgtttcgcgtagttccaccggcaatctggttgaatggttcctgctgcgtaaagcgtatgaacgcaacgaaattgcgccgaataaaccggatgaacgtgaactggcacgtcgccgtggcggttatgcaggcggttacgttaaagaaccggaacgcggcctgtgggataatatcgtctatctggactttatgagtctgtacccgtccattatcattacccataacgttagtccggacacgttcaatcgtgaaggctgcaaagaatatgataccgccccgcaggttggtcacaagttttgtaaagacgtccaaggcttcattccgagtctgctgggtgccctgctggatgaacgccagaaaatcaagaaacgtatgaaggcatccattgatccgctggaaaagaaactgctggactatcgccaaaaggcgatcaaaattctggccaactcatattacggctattacggttatgcacgcgctcgttggtactgcaaagaatgtgcagaatcggtgaccgcttggggccgtgattatattgaaaccacgatccacgaaattgaagaacgctttggtttcaaagttctgtacgctgataccgacggctttttcgcgacgatcccgggtgcggatgccgaaaccgtgaagaaaaaggctaaggaattcctgaagtacatcaacgcgaaactgccgggcctgctggaactggaatatgaaggcttctacgtccgtggctttttcgtgaccaaaaagaaatacgcggttatcgacgaagaaggcaaaattaccacgcgcggtctggaaatcgtgcgccgtgattggagtgaaattgccaaagaaacccaggcacgtgttctggaagcaattctgaaacatggtaacgtcgaagaagcggtcaaaatcgtgaaagaagttacggaaaaactgtctaactacgaaattccgccggaaaaactggccatctacgaacaaattacccgcccgctgcatgaatataaagcaatcggtccgcacgtcgcagtggcaaaacgtctggcagcacgcggcgttaaagtcaaaccgggtatggtcatcggctatattgtgctgcgtggtgatggcccgatcagcaaccgcgcaattctggctgaagaatacgatctgaaaaaacacaaatacgacgccgaatattacatcgaaaatcaggttctgccggctgtcctgcgtattctggaagcgtttggctatcgtaaagaagatctgcgctggcagaaaacccgtcaaacgggtctgacctcatggctgaatattaaaaaatcgtaa

SEQ ID NO: 502 - DNA, 2325 bp, Artificial Sequence
  Synthetic
atgatcctggacgtggactacattaccgaagacggcaaaccgattatccgcatcttcaaaaaagaaaacggcaaattcaaagtggaatatgatcgtaactttcgcccgtatatttacgctctgctgaaagatgacagccagatcgaagaagtccgcaaaattacggcggaacgtcatggtaaaatcgtgcgcatcatcgatgtggaaaaagttgagaaaaaatttctgggccgtccgattaccgtgtggcgcctgtatttcgaacatccgcaagatgttccggctatccgtgacaaagttcgcgaacacagtgcggtcatcgatatttttgaatatgacattccgttcgctaaacgctacctgatcgataaaggtctgattccgatggaaggcgacgaagaactgaaactgctggcctttgatattgaaacgctgtaccacgaaggtgaagaattcggtaaaggcccgattatcatgatctcctatgcagacgaagaagaagcgaaagtcatcacctggaagaaaattgatctgccgtatgtggaagtggttagctctgaacgtgaaatgatcaaacgctttctgaaaatcatccgcgaaaaagatccggacgttattatcacctataacggtgattcattcgacctgccgtacctggtgaaacgtgccgaaaaactgggcatcaaactgacgattggtcgtgacggctcggaaccgaaaatgcagcgcctgggtgatatgaccgcagtcgaaatcaaaggccgtattcattttgatctgtaccacgtgatcacccgcacgattaacctgccgacctatacgctggaagcggtttacgaagccattttcggtaaaccgaaagaaaaagtctatgccgacgaaatcgcagaagcttgggaaagtggcgaaaatctggaacgcgtggcaaaatattccatggaagatgcgaaagccacctacgaactgggtcgtgaatttctgccgatggaaattcagctgtcacgcctggtgggtcaaccgctgtgggacgtttcgcgtagttccaccggcaatctggttgaatggttcctgctgcgtaaagcgtatgaacgcaacgaaattgcgccgaataaaccggatgaacgtgaactggcacgtcgccgtggcggttatgcaggcggttacgttaaagaaccggaacgcggcctgtgggataatatcgtctatctggactttatgagtctgtacccgtccattatcattacccataacgttagtccggacacgttcaatcgtgaaggctgcaaagaatatgataccgccccgcaggttggtcacaagttttgtaaagacgtccaaggcttcattccgagtctgctgggtgccctgctggatgaacgccagaaaatcaagaaacgtatgaaggcatccattgatccgctggaaaagaaactgctggactatcgccaaaaggcgatcaaaattctggccaactcatattacggctattacggttatgcacgcgctcgttggtactgcaaagaatgtgcagaatcggtgaccgcttggggccgtgattatattgaaaccacgatccacgaaattgaagaacgctttggtttcaaagttctgtacgctgataccgacggctttttcgcgacgatcccgggtgcggatgccgaaaccgtgaagaaaaaggctaaggaattcctgaagtacatcaacgcgaaactgccgggcctgctggaactggaatatgaaggcttctacgtccgtggctttttcgtgaccaaaaagaaatacgcggttatcgacgaagaaggcaaaattaccacgcgcggtctggaaatcgtgcgccgtgattggagtgaaattgccaaagaaacccaggcaaaagttctggaagcaatcctgaaacatggtaatgtcgaagaagcagtgaaaattgtcaaggaagtgacggaaaaactgtcgaagtatgaaatcccgccggaaaaactggtgatctacgaacaaattacccgcccgctgcatgaatataaagcgattggcccgcacgtggcagttgctaaacgtctggcagcccgcggtgtcaaagtgcgtccgggcatggtgatcggttatattgttctgcgtggcgatggtccgatcagtaaacgcgcgattctggccgaagaatttgatccgcgcaaacacaagtacgacgccgaatattacatcgaaaaccaggtgctgccggctgttctgcgtattctggaagcgttcggctatcgtaaagaagatctgcgctggcagaaaaccaagcaaacgggtctgaccgcatggctgaatgtgaaaaagaaataa

SEQ ID NO: 503 - DNA, 2328 bp, Artificial Sequence
  Synthetic
atgatcctggacgtggactacattaccgaagacggcaaaccgattatccgcatcttcaaaaaagaaaacggcaaattcaaagtggaatatgatcgtaactttcgcccgtatatttacgctctgctgaaagatgacagccagatcgaagaagtccgcaaaattacggcggaacgtcatggtaaaatcgtgcgcatcatcgatgtggaaaaagttgagaaaaaatttctgggccgtccgattaccgtgtggcgcctgtatttcgaacatccgcaagatgttccggctatccgtgacaaagttcgcgaacacagtgcggtcatcgatatttttgaatatgacattccgttcgctaaacgctacctgatcgataaaggtctgattccgatggaaggcgacgaagaactgaaactgctggcctttgatattgaaacgctgtaccacgaaggtgaagaattcggtaaaggcccgattatcatgatctcctatgcagacgaagaagaagcgaaagtcatcacctggaagaaaattgatctgccgtatgtggaagtggttagctctgaacgtgaaatgatcaaacgctttctgaaaatcatccgcgaaaaagatccggacgttattatcacctataacggtgattcattcgacctgccgtacctggtgaaacgtgccgaaaaactgggcatcaaactgacgattggtcgtgacggctcggaaccgaaaatgcagcgcctgggtgatatgaccgcagtcgaaatcaaaggccgtattcattttgatctgtaccacgtgatcacccgcacgattaacctgccgacctatacgctggaagcggtttacgaagccattttcggtaaaccgaaagaaaaagtctatgccgacgaaatcgcagaagcttgggaaagtggcgaaaatctggaacgcgtggcaaaatattccatggaagatgcgaaagccacctacgaactgggtcgtgaatttctgccgatggaaattcagctgtcacgcctggtgggtcaaccgctgtgggacgtttcgcgtagttccaccggcaatctggttgaatggttcctgctgcgtaaagcgtatgaacgcaacgaactggctccgaataagccggatgaacgcgaactggttcgtcgccgtaacagctataccggcggttacgtcaaagaaccggaacgcggcctgtgggataatatcgtttatctggactttcgtagtctgtacccgtccattatcattacccataacgtgtcaccggacacgctgaatcgtgaaggctgcaaagaatatgatgaagccccgcaagtgggtcacaagttctgtaaagactttccgggcttcattccgtcgctgctgggtaacctgctggatgaacgccagaaaatcaagaaacgtatgaaggcaaccattgatccgctggaaaagaaactgctggactatcgtcaacgcgctatcaaaattctggcgaattcttattacggctattacgcgtatgcgcgtgcgcgctggtactgcaaagaatgtgccgaaagtgtgaccgcatggggccgcgaatatattgaaatgtccatccgtgaaatcgaagaaaagtacggtttcaaggttctgtacgcggataccgacggtttccacgcaacgatcccgggtgccgatgcagaaaccgtgaagaaaaaggcgatggaattcctgaagtacatcaacgctaagctgccgggtgcgctggaactggaatatgaaggcttctacaaacgtggctttttcgtgacgaaaaagaaatacgccgttatcgacgaagaaggcaaaattaccacgcgcggtctggaaatcgtgcgccgtgattggagtgaaattgccaaagaaacccaggcacgcgttctggaagcaatcctgcgtcatggtgacgtcgaagaagccgttcgcattgtcaaagatgtgacggaaaagctgtcgaaatatgaagtcccgccggaaaaactggtgatccatgaacaaattacccgtgaactgaaggattacaaagcgacgggcccgcacgttgcaattgctaaacgcctggcagcccgtggcatcaagattcgtccgggtaccgttatcagctatattgtcctgaaaggctctggtcgcatcggtgatcgtgctattccgtttgatgaattcgacccgacgaaacaccgttacgatgccgaatattacatcgaaaatcaggtgctgccggccgttgaacgcattctgaaagcatttggctataagaaagaagaactgcgctaccagaaaacccgtcaagtgggcctgggtgcgtggctgaagctgaaaggtaagaaataa

SEQ ID NO: 504 - DNA, 2322 bp, Artificial Sequence
  Synthetic
atgatcctggacgtggactacattaccgaagacggcaaaccgattatccgcatcttcaaaaaagaaaacggcaaattcaaagtggaatatgatcgtaactttcgcccgtatatttacgctctgctgaaagatgacagccagatcgaagaagtccgcaaaattacggcggaacgtcatggtaaaatcgtgcgcatcatcgatgtggaaaaagttgagaaaaaatttctgggccgtccgattaccgtgtggcgcctgtatttcgaacatccgcaagatgttccggctatccgtgacaaagttcgcgaacacagtgcggtcatcgatatttttgaatatgacattccgttcgctaaacgctacctgatcgataaaggtctgattccgatggaaggcgacgaagaactgaaactgctggcctttgatattgaaacgctgtaccacgaaggtgaagaattcggtaaaggcccgattatcatgatctcctatgcagacgaagaagaagcgaaagtcatcacctggaagaaaattgatctgccgtatgtggaagtggttagctctgaacgtgaaatgatcaaacgctttctgaaaatcatccgcgaaaaagatccggacgttattatcacctataacggtgattcattcgacctgccgtacctggtgaaacgtgccgaaaaactgggcatcaaactgacgattggtcgtgacggctcggaaccgaaaatgcagcgcctgggtgatatgaccgcagtcgaaatcaaaggccgtattcattttgatctgtaccacgtgatcacccgcacgattaacctgccgacctatacgctggaagcggtttacgaagccattttcggtaaaccgaaagaaaaagtctatgccgacgaaatcgcagaagcttgggaaagtggcgaaaatctggaacgcgtggcaaaatattccatggaagatgcgaaagccacctacgaactgggtcgtgaatttctgccgatggaaattcagctgtcacgcctggtgggtcaaccgctgtgggacgtttcgcgtagttccaccggcaatctggttgaatggttcctgctgcgtaaagcgtatgaacgcaacgaactggctccgaataagccggatgaacgcgaactggttcgtcgccgtaacagctataccggcggttacgtcaaagaaccggaacgcggcctgtgggataatatcgtttatctggactttcgtagtctgtacccgtccattatcattacccataacgtgtcaccggacacgctgaatcgtgaaggctgcaaagaatatgatgaagccccgcaagtgggtcacaagttctgtaaagactttccgggcttcattccgtcgctgctgggtaacctgctggatgaacgccagaaaatcaagaaacgtatgaaggcaaccattgatccgctggaaaagaaactgctggactatcgtcaacgcgctatcaaaattctggcgaattcttattacggctattacgcgtatgcgcgtgcgcgctggtactgcaaagaatgtgccgaaagtgtgaccgcatggggccgcgaatatattgaaatgtccatccgtgaaatcgaagaaaagtacggtttcaaggttctgtacgcggataccgacggtttccacgcaacgatcccgggtgccgatgcagaaaccgtgaagaaaaaggcgatggaattcctgaagtacatcaacgctaagctgccgggtgcgctggaactggaatatgaaggcttctacaaacgtggctttttcgtgacgaaaaagaaatacgccgttatcgacgaagaaggcaaaattaccacgcgcggtctggaaatcgtgcgccgtgattggagtgaaattgccaaagaaacccaggcacgtgtcctggaagcaatcctgaaacatggtgatgtggaagaagcggttcgcattgtcaaagaagtgacggaaaagctgtcgaaatatgaagttccgccggaaaaactggtcatccatgaacaaattacccgcgatctgcgtgactacaaagccacgggtccgcacgtggcagttgcaaaacgtctggcagcccgtggcgtgaagattcgtccgggtaccgtgatcagttatattgttctgaaaggctccggtcgcatcggtgaccgtgctattccgtttgatgaattcgacccgacgaaacaccgttacgatgccgaatattacatcgaaaatcaggtcctgccggccgtggaacgcattctgaaagcatttggttatcgcaaggaagatctgcgttaccagaagaccaaacaagtcggcctgggtgcgtggctgaaagtgaaaaagtaa

SEQ ID NO: 505 - DNA, 2328 bp, Artificial Sequence
  Synthetic
atgatcctggacgtggactacattaccgaagacggcaaaccgattatccgcatcttcaaaaaagaaaacggcaaattcaaagtggaatatgatcgtaactttcgcccgtatatttacgctctgctgaaagatgacagccagatcgaagaagtccgcaaaattacggcggaacgtcatggtaaaatcgtgcgcatcatcgatgtggaaaaagttgagaaaaaatttctgggccgtccgattaccgtgtggcgcctgtatttcgaacatccgcaagatgttccggctatccgtgacaaagttcgcgaacacagtgcggtcatcgatatttttgaatatgacattccgttcgctaaacgctacctgatcgataaaggtctgattccgatggaaggcgacgaagaactgaaactgctggcctttgatattgaaacgctgtaccacgaaggtgaagaattcggtaaaggcccgattatcatgatctcctatgcagacgaagaagaagcgaaagtcatcacctggaagaaaattgatctgccgtatgtggaagtggttagctctgaacgtgaaatgatcaaacgctttctgaaaatcatccgcgaaaaagatccggacgttattatcacctataacggtgattcattcgacctgccgtacctggtgaaacgtgccgaaaaactgggcatcaaactgacgattggtcgtgacggctcggaaccgaaaatgcagcgcctgggtgatatgaccgcagtcgaaatcaaaggccgtattcattttgatctgtaccacgtgatcacccgcacgattaacctgccgacctatacgctggaagcggtttacgaagccattttcggtaaaccgaaagaaaaagtctatgccgacgaaatcgcagaagcttgggaaagtggcgaaaatctggaacgcgtggcaaaatattccatggaagatgcgaaagccacctacgaactgggtcgtgaatttctgccgatggaaattcagctgtcacgcctggtgggtcaaccgctgtgggacgtttcgcgtagttccaccggcaatctggttgaatggttcctgctgcgtaaagcgtatgaacgcaacgaactggctccgaataagccggatgaacgcgaactggttcgtcgccgtaacagctataccggcggttacgtcaaagaaccggaacgcggcctgtgggataatatcgtttatctggactttcgtagtctgtacccgtccattatcattacccataacgtgtcaccggacacgctgaatcgtgaaggctgcaaagaatatgatgaagccccgcaagtgggtcacaagttctgtaaagactttccgggcttcattccgtcgctgctgggtaacctgctggatgaacgccagaaaatcaagaaacgtatgaaggcaaccattgatccgctggaaaagaaactgctggactatcgtcaacgcgctatcaaaattctggcgaattcttattacggctattacgcgtatgcgcgtgcgcgctggtactgcaaagaatgtgccgaaagtgtgaccgcatggggccgcgaatatattgaaatgtccatccgtgaaatcgaagaaaagtacggtttcaaggttctgtacgcggataccgacggtttccacgcaacgatcccgggtgccgatgcagaaaccgtgaagaaaaaggcgatggaattcctgaagtacatcaacgctaagctgccgggtgcgctggaactggaatatgaaggcttctacaaacgtggctttttcgtgacgaaaaagaaatacgccgttatcgacgaagaaggcaaaattaccacgcgcggtctggaaatcgtgcgccgtgattggagtgaaattgccaaagaaacccaggcacgtgtgctggaagctctgctgaaagatggcaatgttgaagaagcggtttccattgtcaaagaagtgacggaaaagctgggtaaatatgaagtcccgccggaaaaactggtgatccatgaacaaattacccgcgaactgaaggattacaaagcgacgggcccgcacgttgctatcgcgaaacgtctggcagcgcgtggcgtgaagattcgtccgggtaccgttatcagctatattgtcctgaaaggctctggtcgtatcggtgaccgcgcgattccgtttgatgaattcgacccgacgaaacatcgctacgatgcagaatattacatcgaaaaccaggttctgccggctgtcgaacgtattctgaaagcgtttggctatcgtgccgaagatctgcgctaccagaaaacccgtcaagtgggcctgggtgtttggctgcaaccgaaaggtaagaaataa

SEQ ID NO: 506 - DNA, 2325 bp, Artificial Sequence
  Synthetic
atgatcctggacgtggactacattaccgaagacggcaaaccgattatccgcatcttcaaaaaagaaaacggcaaattcaaagtggaatatgatcgtaactttcgcccgtatatttacgctctgctgaaagatgacagccagatcgaagaagtccgcaaaattacggcggaacgtcatggtaaaatcgtgcgcatcatcgatgtggaaaaagttgagaaaaaatttctgggccgtccgattaccgtgtggcgcctgtatttcgaacatccgcaagatgttccggctatccgtgacaaagttcgcgaacacagtgcggtcatcgatatttttgaatatgacattccgttcgctaaacgctacctgatcgataaaggtctgattccgatggaaggcgacgaagaactgaaactgctggcctttgatattgaaacgctgtaccacgaaggtgaagaattcggtaaaggcccgattatcatgatctcctatgcagacgaagaagaagcgaaagtcatcacctggaagaaaattgatctgccgtatgtggaagtggttagctctgaacgtgaaatgatcaaacgctttctgaaaatcatccgcgaaaaagatccggacgttattatcacctataacggtgattcattcgacctgccgtacctggtgaaacgtgccgaaaaactgggcatcaaactgacgattggtcgtgacggctcggaaccgaaaatgcagcgcctgggtgatatgaccgcagtcgaaatcaaaggccgtattcattttgatctgtaccacgtgatcacccgcacgattaacctgccgacctatacgctggaagcggtttacgaagccattttcggtaaaccgaaagaaaaagtctatgccgacgaaatcgcagaagcttgggaaagtggcgaaaatctggaacgcgtggcaaaatattccatggaagatgcgaaagccacctacgaactgggtcgtgaatttctgccgatggaaattcagctgtcacgcctggtgggtcaaccgctgtgggacgtttcgcgtagttccaccggcaatctggttgaatggttcctgctgcgtaaagcgtatgaacgcaacgaactggctccgaataagccggatgaacgcgaactggttcgtcgccgtaacagctataccggcggttacgtcaaagaaccggaacgcggcctgtgggataatatcgtttatctggactttcgtagtctgtacccgtccattatcattacccataacgtgtcaccggacacgctgaatcgtgaaggctgcaaagaatatgatgaagccccgcaagtgggtcacaagttctgtaaagactttccgggcttcattccgtcgctgctgggtaacctgctggatgaacgccagaaaatcaagaaacgtatgaaggcaaccattgatccgctggaaaagaaactgctggactatcgtcaacgcgctatcaaaattctggcgaattcttattacggctattacgcgtatgcgcgtgcgcgctggtactgcaaagaatgtgccgaaagtgtgaccgcatggggccgcgaatatattgaaatgtccatccgtgaaatcgaagaaaagtacggtttcaaggttctgtacgcggataccgacggtttccacgcaacgatcccgggtgccgatgcagaaaccgtgaagaaaaaggcgatggaattcctgaagtacatcaacgctaagctgccgggtgcgctggaactggaatatgaaggcttctacaaacgtggctttttcgtgacgaaaaagaaatacgccgttatcgacgaagaaggcaaaattaccacgcgcggtctggaaatcgtgcgccgtgattggagtgaaattgccaaagaaacccaggcaaaggttctggaagcaattctgaaacatggtaacgtcgaagaagcggtcaagatcgtgaaagaagttaccgaaaaactgtcgaattatgaaattccggtcgaaaagctggtgatctacgaacaaattacgcgcccgctgaacgaatataaagccattggcccgcacgtggcagttgctaaacgtctggcggccaagggtatcaagattaaaccgggcatggtgattggttatgttgtcctgcgcggcgatggtccgatcagcaaacgtgcgatcgccatcgaagaattcgatggcaaaaagcataagtacgacgcagaatactacatcgaaaatcaggttctgccggccgtcgaacgtatcctgaaagcattcggttataagcgtgaagatctgcgctggcagaagaccaaacaagtgggcctgggtgcgtggctgaaagttaaaaagtcttaa

SEQ ID NO: 507 - DNA, 2328 bp, Artificial Sequence
  Synthetic
atgatcctggacgtggactacattaccgaagacggcaaaccgattatccgcatcttcaaaaaagaaaacggcaaattcaaagtggaatatgatcgtaactttcgcccgtatatttacgctctgctgaaagatgacagccagatcgaagaagtccgcaaaattacggcggaacgtcatggtaaaatcgtgcgcatcatcgatgtggaaaaagttgagaaaaaatttctgggccgtccgattaccgtgtggcgcctgtatttcgaacatccgcaagatgttccggctatccgtgacaaagttcgcgaacacagtgcggtcatcgatatttttgaatatgacattccgttcgctaaacgctacctgatcgataaaggtctgattccgatggaaggcgacgaagaactgaaactgctggcctttgatattgaaacgctgtaccacgaaggtgaagaattcggtaaaggcccgattatcatgatctcctatgcagacgaagaagaagcgaaagtcatcacctggaagaaaattgatctgccgtatgtggaagtggttagctctgaacgtgaaatgatcaaacgctttctgaaaatcatccgcgaaaaagatccggacgttattatcacctataacggtgattcattcgacctgccgtacctggtgaaacgtgccgaaaaactgggcatcaaactgacgattggtcgtgacggctcggaaccgaaaatgcagcgcctgggtgatatgaccgcagtcgaaatcaaaggccgtattcattttgatctgtaccacgtgatcacccgcacgattaacctgccgacctatacgctggaagcggtttacgaagccattttcggtaaaccgaaagaaaaagtctatgccgacgaaatcgcagaagcttgggaaagtggcgaaaatctggaacgcgtggcaaaatattccatggaagatgcgaaagccacctacgaactgggtcgtgaatttctgccgatggaaattcagctgtcacgcctggtgggtcaaccgctgtgggacgtttcgcgtagttccaccggcaatctggttgaatggttcctgctgcgtaaagcgtatgaacgcaacgaactggctccgaataagccggatgaacgcgaactggttcgtcgccgtaacagctataccggcggttacgtcaaagaaccggaacgcggcctgtgggataatatcgtttatctggactttcgtagtctgtacccgtccattatcattacccataacgtgtcaccggacacgctgaatcgtgaaggctgcaaagaatatgatgaagccccgcaagtgggtcacaagttctgtaaagactttccgggcttcattccgtcgctgctgggtaacctgctggatgaacgccagaaaatcaagaaacgtatgaaggcaaccattgatccgctggaaaagaaactgctggactatcgtcaacgcgctatcaaaattctggcgaattcttattacggctattacgcgtatgcgcgtgcgcgctggtactgcaaagaatgtgccgaaagtgtgaccgcatggggccgcgaatatattgaaatgtccatccgtgaaatcgaagaaaagtacggtttcaaggttctgtacgcggataccgacggtttccacgcaacgatcccgggtgccgatgcagaaaccgtgaagaaaaaggcgatggaattcctgaagtacatcaacgctaagctgccgggtgcgctggaactggaatatgaaggcttctacaaacgtggctttttcgtgacgaaaaagaaatacgccgttatcgacgaagaaggcaaaattaccacgcgcggtctggaaatcgtgcgccgtgattggagtgaaattgccaaagaaacccaggcacgtgttctggaagcactgctgaaagatggtaatgtcgaagaagcagtgagtattgttaaagaagtcacggaaaaactgtccaagtatgaagtcccgccggaaaaactggtgattcatgaacaaatcacccgcgaactgaaagattacaaggcgacgggcccgcacgtggcaattgctaaacgtctggcagcgcgtggcgttaagatccgtccgggtaccgttattagctatatcgtcctgaaaggctctggtcgtattggtgaccgcgccatcccgtttgatgaattcgacccggctaaacaccgctacgatgcggaatattacattgaaaatcaggtcctgccggctgtggaacgtatcctgaaagcgtttggctatcgtaaggaagatctgcgctaccagaaaacccgtcaagtgggcctgggtgcgtggctgaaaccgaagggtaaaaagtaa

SEQ ID NO: 508 - DNA, 2328 bp, Artificial Sequence
  Synthetic
atgatcctggacgtggactacattaccgaagacggcaaaccgattatccgcatcttcaaaaaagaaaacggcaaattcaaagtggaatatgatcgtaactttcgcccgtatatttacgctctgctgaaagatgacagccagatcgaagaagtccgcaaaattacggcggaacgtcatggtaaaatcgtgcgcatcatcgatgtggaaaaagttgagaaaaaatttctgggccgtccgattaccgtgtggcgcctgtatttcgaacatccgcaagatgttccggctatccgtgacaaagttcgcgaacacagtgcggtcatcgatatttttgaatatgacattccgttcgctaaacgctacctgatcgataaaggtctgattccgatggaaggcgacgaagaactgaaactgctggcctttgatattgaaacgctgtaccacgaaggtgaagaattcggtaaaggcccgattatcatgatctcctatgcagacgaagaagaagcgaaagtcatcacctggaagaaaattgatctgccgtatgtggaagtggttagctctgaacgtgaaatgatcaaacgctttctgaaaatcatccgcgaaaaagatccggacgttattatcacctataacggtgattcattcgacctgccgtacctggtgaaacgtgccgaaaaactgggcatcaaactgacgattggtcgtgacggctcggaaccgaaaatgcagcgcctgggtgatatgaccgcagtcgaaatcaaaggccgtattcattttgatctgtaccacgtgatcacccgcacgattaacctgccgacctatacgctggaagcggtttacgaagccattttcggtaaaccgaaagaaaaagtctatgccgacgaaatcgcagaagcttgggaaagtggcgaaaatctggaacgcgtggcaaaatattccatggaagatgcgaaagccacctacgaactgggtcgtgaatttctgccgatggaaattcagctgtcacgcctggtgggtcaaccgctgtgggacgtttcgcgtagttccaccggcaatctggttgaatggttcctgctgcgtaaagcgtatgaacgcaacgaactggctccgaataagccggatgaacgcgaactggttcgtcgccgtaacagctataccggcggttacgtcaaagaaccggaacgcggcctgtgggataatatcgtttatctggactttcgtagtctgtacccgtccattatcattacccataacgtgtcaccggacacgctgaatcgtgaaggctgcaaagaatatgatgaagccccgcaagtgggtcacaagttctgtaaagactttccgggcttcattccgtcgctgctgggtaacctgctggatgaacgccagaaaatcaagaaacgtatgaaggcaaccattgatccgctggaaaagaaactgctggactatcgtcaacgcgctatcaaaattctggcgaattcttattacggctattacgcgtatgcgcgtgcgcgctggtactgcaaagaatgtgccgaaagtgtgaccgcatggggccgcgaatatattgaaatgtccatccgtgaaatcgaagaaaagtacggtttcaaggttctgtacgcggataccgacggtttccacgcaacgatcccgggtgccgatgcagaaaccgtgaagaaaaaggcgatggaattcctgaagtacatcaacgctaagctgccgggtgcgctggaactggaatatgaaggcttctacaaacgtggctttttcgtgacgaaaaagaaatacgccgttatcgacgaagaaggcaaaattaccacgcgcggtctggaaatcgtgcgccgtgattggagtgaaattgccaaagaaacccaggcacgcgtcctggaagcaatcctgaaagatggtgacgtggaagaagccgtccgtattgtgaaagaagttacggaaaaactgtccaaatatgaagttccgccggaaaaactggtcatccatgaacaaattacccgcgaactgaaagattacaaagcgacgggcccgcacgtcgcaatcgctaaacgtctggcggcgcgtggcgtgaaaattcgtccgggtaccgtgatctcatatattgttctgaaaggctcgggtcgtatcggtgaccgcgctattccgtttgatgaattcgacccgaaaaaacacaaatacgatgcggaatactacatcgaaaaccaggttctgccggccgtcgaacgtattctgcgcgcatttggctaccgtaaagaagatctgcgttatcaaaaaaccaaacaagtgggtctgggtgcgtggctgaaaccgaaaggtaaaaaataa

SEQ ID NO: 509 - DNA, 2325 bp, Artificial Sequence
  Synthetic
atgatcctggacgtggactacattaccgaagacggcaaaccgattatccgcatcttcaaaaaagaaaacggcaaattcaaagtggaatatgatcgtaactttcgcccgtatatttacgctctgctgaaagatgacagccagatcgaagaagtccgcaaaattacggcggaacgtcatggtaaaatcgtgcgcatcatcgatgtggaaaaagttgagaaaaaatttctgggccgtccgattaccgtgtggcgcctgtatttcgaacatccgcaagatgttccggctatccgtgacaaagttcgcgaacacagtgcggtcatcgatatttttgaatatgacattccgttcgctaaacgctacctgatcgataaaggtctgattccgatggaaggcgacgaagaactgaaactgctggcctttgatattgaaacgctgtaccacgaaggtgaagaattcggtaaaggcccgattatcatgatctcctatgcagacgaagaagaagcgaaagtcatcacctggaagaaaattgatctgccgtatgtggaagtggttagctctgaacgtgaaatgatcaaacgctttctgaaaatcatccgcgaaaaagatccggacgttattatcacctataacggtgattcattcgacctgccgtacctggtgaaacgtgccgaaaaactgggcatcaaactgacgattggtcgtgacggctcggaaccgaaaatgcagcgcctgggtgatatgaccgcagtcgaaatcaaaggccgtattcattttgatctgtaccacgtgatcacccgcacgattaacctgccgacctatacgctggaagcggtttacgaagccattttcggtaaaccgaaagaaaaagtctatgccgacgaaatcgcagaagcttgggaaagtggcgaaaatctggaacgcgtggcaaaatattccatggaagatgcgaaagccacctacgaactgggtcgtgaatttctgccgatggaaattcagctgtcacgcctggtgggtcaaccgctgtgggacgtttcgcgtagttccaccggcaatctggttgaatggttcctgctgcgtaaagcgtatgaacgcaacgaactggctccgaataagccggatgaacgcgaactggttcgtcgccgtaacagctataccggcggttacgtcaaagaaccggaacgcggcctgtgggataatatcgtttatctggactttcgtagtctgtacccgtccattatcattacccataacgtgtcaccggacacgctgaatcgtgaaggctgcaaagaatatgatgaagccccgcaagtgggtcacaagttctgtaaagactttccgggcttcattccgtcgctgctgggtaacctgctggatgaacgccagaaaatcaagaaacgtatgaaggcaaccattgatccgctggaaaagaaactgctggactatcgtcaacgcgctatcaaaattctggcgaattcttattacggctattacgcgtatgcgcgtgcgcgctggtactgcaaagaatgtgccgaaagtgtgaccgcatggggccgcgaatatattgaaatgtccatccgtgaaatcgaagaaaagtacggtttcaaggttctgtacgcggataccgacggtttccacgcaacgatcccgggtgccgatgcagaaaccgtgaagaaaaaggcgatggaattcctgaagtacatcaacgctaagctgccgggtgcgctggaactggaatatgaaggcttctacaaacgtggctttttcgtgacgaaaaagaaatacgccgttatcgacgaagaaggcaaaattaccacgcgcggtctggaaatcgtgcgccgtgattggagtgaaattgccaaagaaacccaggcacgtgttctggaagcaattctgaaacatggtaacgtcgaagaagcggtcaaaatcgtgaaagaagttacggaaaaactgtctaactacgaaattccgccggaaaaactggccatctacgaacaaattacccgcccgctgcatgaatataaagcaatcggtccgcacgtcgcagtggcaaaacgtctggcagcacgcggcgttaaagtcaaaccgggtatggtcatcggctatattgtgctgcgtggtgatggcccgatcagcaaccgcgcaattctggctgaagaatacgatctgaaaaaacacaaatacgacgccgaatattacatcgaaaatcaggttctgccggctgtcctgcgtattctggaagcgtttggctatcgtaaagaagatctgcgctggcagaaaacccgtcaaacgggtctgacctcatggctgaatattaaaaaatcgtaa

SEQ ID NO: 510 - DNA, 2325 bp, Artificial Sequence
  Synthetic
atgatcctggacgtggactacattaccgaagacggcaaaccgattatccgcatcttcaaaaaagaaaacggcaaattcaaagtggaatatgatcgtaactttcgcccgtatatttacgctctgctgaaagatgacagccagatcgaagaagtccgcaaaattacggcggaacgtcatggtaaaatcgtgcgcatcatcgatgtggaaaaagttgagaaaaaatttctgggccgtccgattaccgtgtggcgcctgtatttcgaacatccgcaagatgttccggctatccgtgacaaagttcgcgaacacagtgcggtcatcgatatttttgaatatgacattccgttcgctaaacgctacctgatcgataaaggtctgattccgatggaaggcgacgaagaactgaaactgctggcctttgatattgaaacgctgtaccacgaaggtgaagaattcggtaaaggcccgattatcatgatctcctatgcagacgaagaagaagcgaaagtcatcacctggaagaaaattgatctgccgtatgtggaagtggttagctctgaacgtgaaatgatcaaacgctttctgaaaatcatccgcgaaaaagatccggacgttattatcacctataacggtgattcattcgacctgccgtacctggtgaaacgtgccgaaaaactgggcatcaaactgacgattggtcgtgacggctcggaaccgaaaatgcagcgcctgggtgatatgaccgcagtcgaaatcaaaggccgtattcattttgatctgtaccacgtgatcacccgcacgattaacctgccgacctatacgctggaagcggtttacgaagccattttcggtaaaccgaaagaaaaagtctatgccgacgaaatcgcagaagcttgggaaagtggcgaaaatctggaacgcgtggcaaaatattccatggaagatgcgaaagccacctacgaactgggtcgtgaatttctgccgatggaaattcagctgtcacgcctggtgggtcaaccgctgtgggacgtttcgcgtagttccaccggcaatctggttgaatggttcctgctgcgtaaagcgtatgaacgcaacgaactggctccgaataagccggatgaacgcgaactggttcgtcgccgtaacagctataccggcggttacgtcaaagaaccggaacgcggcctgtgggataatatcgtttatctggactttcgtagtctgtacccgtccattatcattacccataacgtgtcaccggacacgctgaatcgtgaaggctgcaaagaatatgatgaagccccgcaagtgggtcacaagttctgtaaagactttccgggcttcattccgtcgctgctgggtaacctgctggatgaacgccagaaaatcaagaaacgtatgaaggcaaccattgatccgctggaaaagaaactgctggactatcgtcaacgcgctatcaaaattctggcgaattcttattacggctattacgcgtatgcgcgtgcgcgctggtactgcaaagaatgtgccgaaagtgtgaccgcatggggccgcgaatatattgaaatgtccatccgtgaaatcgaagaaaagtacggtttcaaggttctgtacgcggataccgacggtttccacgcaacgatcccgggtgccgatgcagaaaccgtgaagaaaaaggcgatggaattcctgaagtacatcaacgctaagctgccgggtgcgctggaactggaatatgaaggcttctacaaacgtggctttttcgtgacgaaaaagaaatacgccgttatcgacgaagaaggcaaaattaccacgcgcggtctggaaatcgtgcgccgtgattggagtgaaattgccaaagaaacccaggcaaaagttctggaagcaatcctgaaacatggtaatgtcgaagaagcagtgaaaattgtcaaggaagtgacggaaaaactgtcgaagtatgaaatcccgccggaaaaactggtgatctacgaacaaattacccgcccgctgcatgaatataaagcgattggcccgcacgtggcagttgctaaacgtctggcagcccgcggtgtcaaagtgcgtccgggcatggtgatcggttatattgttctgcgtggcgatggtccgatcagtaaacgcgcgattctggccgaagaatttgatccgcgcaaacacaagtacgacgccgaatattacatcgaaaaccaggtgctgccggctgttctgcgtattctggaagcgttcggctatcgtaaagaagatctgcgctggcagaaaaccaagcaaacgggtctgaccgcatggctgaatgtgaaaaagaaataa

SEQ ID NO: 511 - DNA, 2328 bp, Artificial Sequence
  Synthetic
atgatcctggacgcaaactacattaccgaagatggcaaaccgattatccgcattttcaagaaggaaaacggcgaatttaaggtggaatatgaccgtaactttcgcccgtatatttacgctctgctgaaagatgacagccagatcgatgaagtgaaaaagattaccgcggaacgtcatggcaaaatcgttcgcattgttgatgtcgaaaaggtcaaaaagaaatttctgggtcgcccgattgaagtgtggaaactgtatttcgaacatccgcaagatgttccggctatccgtgacaaaattcgcgaacacccggcggtggttgatatctttgaatatgacattccgttcgcgaagcgttacctgatcgataaaggcctgattccgatggaaggtgacgaagaactgaaactgctggcctttgatattgaaacgctgtaccacgaaggcgaagaattcgcaaaaggtccgattatcatgatcagctatgcggacgaagaaggcgccaaagttattacctggaagaaagtcgatctgccgtatgtggaagtcgtgagctctgaacgtgaaatgatcaaacgctttctgaaagtgattcgcgaaaaagatccggacgttattatcacctataacggcgatagtttcgacctgccgtacctggtgaaacgtgccgaaaagctgggtattaaactgccgctgggtcgtgacggttccgaaccgaaaatgcagcgcctgggcgatatgacggcagttgaaatcaaaggtcgcattcattttgatctgtaccacgtgatccgtcgcaccattaatctgccgacctatacgctggaagcagtttacgaagctatcttcggcaagccgaaagaaaaggtctatgcccatgaaattgcagaagcttgggaaacgggcaagggtctggaacgtgtcgctaaatatagcatggaagatgcgaaggtgacctacgaactgggtcgtgaatttttcccgatggaagcacagctgagccgcctggtcggccaaccgctgtgggatgtgtctcgtagttccaccggtaacctggtggaatggtatctgctgcgtaaagcgtatgaacgcaacgaactggcaccgaataaaccgtccggccgcgaatacgatgaacgtcgcggcggttatgcgggcggttacgttaaagaaccggaaaagggtctgtgggaaaacatcgtctacctggattacaagagtctgtatccgtccattatcattacccataacgttagtccggacacgctgaatcgcgaaggctgcaaagaatacgatgtggcgccgcaggttggtcaccgtttttgtaaagactttccgggcttcattccgtccctgctgggtgatctgctggaagaacgtcagaaaatcaagcgcaaaatgaaggccaccattgatccgatcgaacgtcgcctgctggactatcgtcaacgcgcgatcaaaattctggccaacagctattacggctattacggttatgcgcgtgcccgctggtactgcaaagaatgtgcagaaagcgttacggcttggggccgcgaatacatcgaaatgtctatccgtgaaatcgaagaaaagtacggtttcaaggtgctgtacgctgataccgacggcttccatgcgacgattccgggtgaagatgccgaaaccatcaaaaagaaagcaatggaattcctgaagtacatcaactcaaagctgccgggcgccctggaactggaatatgaaggcttctaccgtcgcggctttttcgttacgaagaaaaagtacgcagtcattgacgaagaaggcaaaatcaccacgcgcggtctggaaattgtgcgtcgcgattggagtgaaattgccaaagaaacccaggcacgcgttctggaagcaatcctgcgtcatggtgacgtcgaagaagccgttcgcattgtcaaagatgtgacggaaaagctgtcgaaatatgaagtcccgccggaaaaactggtgatccatgaacaaattacccgtgaactgaaggattacaaagcgacgggcccgcacgttgcaattgctaaacgcctggcagcccgtggcatcaagattcgtccgggtaccgttatcagctatattgtcctgaaaggctctggtcgcatcggtgatcgtgctattccgtttgatgaattcgacccgacgaaacaccgttacgatgccgaatattacatcgaaaatcaggtgctgccggccgttgaacgcattctgaaagcatttggctataagaaagaagaactgcgctaccagaaaacccgtcaagtgggcctgggtgcgtggctgaagctgaaaggtaagaaataa

SEQ ID NO: 512 - DNA, 2322 bp, Artificial Sequence
  Synthetic
atgatcctggacgcaaactacattaccgaagatggcaaaccgattatccgcattttcaagaaggaaaacggcgaatttaaggtggaatatgaccgtaactttcgcccgtatatttacgctctgctgaaagatgacagccagatcgatgaagtgaaaaagattaccgcggaacgtcatggcaaaatcgttcgcattgttgatgtcgaaaaggtcaaaaagaaatttctgggtcgcccgattgaagtgtggaaactgtatttcgaacatccgcaagatgttccggctatccgtgacaaaattcgcgaacacccggcggtggttgatatctttgaatatgacattccgttcgcgaagcgttacctgatcgataaaggcctgattccgatggaaggtgacgaagaactgaaactgctggcctttgatattgaaacgctgtaccacgaaggcgaagaattcgcaaaaggtccgattatcatgatcagctatgcggacgaagaaggcgccaaagttattacctggaagaaagtcgatctgccgtatgtggaagtcgtgagctctgaacgtgaaatgatcaaacgctttctgaaagtgattcgcgaaaaagatccggacgttattatcacctataacggcgatagtttcgacctgccgtacctggtgaaacgtgccgaaaagctgggtattaaactgccgctgggtcgtgacggttccgaaccgaaaatgcagcgcctgggcgatatgacggcagttgaaatcaaaggtcgcattcattttgatctgtaccacgtgatccgtcgcaccattaatctgccgacctatacgctggaagcagtttacgaagctatcttcggcaagccgaaagaaaaggtctatgcccatgaaattgcagaagcttgggaaacgggcaagggtctggaacgtgtcgctaaatatagcatggaagatgcgaaggtgacctacgaactgggtcgtgaatttttcccgatggaagcacagctgagccgcctggtcggccaaccgctgtgggatgtgtctcgtagttccaccggtaacctggtggaatggtatctgctgcgtaaagcgtatgaacgcaacgaactggcaccgaataaaccgtccggccgcgaatacgatgaacgtcgcggcggttatgcgggcggttacgttaaagaaccggaaaagggtctgtgggaaaacatcgtctacctggattacaagagtctgtatccgtccattatcattacccataacgttagtccggacacgctgaatcgcgaaggctgcaaagaatacgatgtggcgccgcaggttggtcaccgtttttgtaaagactttccgggcttcattccgtccctgctgggtgatctgctggaagaacgtcagaaaatcaagcgcaaaatgaaggccaccattgatccgatcgaacgtcgcctgctggactatcgtcaacgcgcgatcaaaattctggccaacagctattacggctattacggttatgcgcgtgcccgctggtactgcaaagaatgtgcagaaagcgttacggcttggggccgcgaatacatcgaaatgtctatccgtgaaatcgaagaaaagtacggtttcaaggtgctgtacgctgataccgacggcttccatgcgacgattccgggtgaagatgccgaaaccatcaaaaagaaagcaatggaattcctgaagtacatcaactcaaagctgccgggcgccctggaactggaatatgaaggcttctaccgtcgcggctttttcgttacgaagaaaaagtacgcagtcattgacgaagaaggcaaaatcaccacgcgcggtctggaaattgtgcgtcgcgattggagtgaaattgccaaagaaacccaggcacgtgtcctggaagcaatcctgaaacatggtgatgtggaagaagcggttcgcattgtcaaagaagtgacggaaaagctgtcgaaatatgaagttccgccggaaaaactggtcatccatgaacaaattacccgcgatctgcgtgactacaaagccacgggtccgcacgtggcagttgcaaaacgtctggcagcccgtggcgtgaagattcgtccgggtaccgtgatcagttatattgttctgaaaggctccggtcgcatcggtgaccgtgctattccgtttgatgaattcgacccgacgaaacaccgttacgatgccgaatattacatcgaaaatcaggtcctgccggccgtggaacgcattctgaaagcatttggttatcgcaaggaagatctgcgttaccagaagaccaaacaagtcggcctgggtgcgtggctgaaagtgaaaaagtaa

SEQ ID NO: 513 - DNA, 2328 bp, Artificial Sequence
  Synthetic
atgatcctggacgcaaactacattaccgaagatggcaaaccgattatccgcattttcaagaaggaaaacggcgaatttaaggtggaatatgaccgtaactttcgcccgtatatttacgctctgctgaaagatgacagccagatcgatgaagtgaaaaagattaccgcggaacgtcatggcaaaatcgttcgcattgttgatgtcgaaaaggtcaaaaagaaatttctgggtcgcccgattgaagtgtggaaactgtatttcgaacatccgcaagatgttccggctatccgtgacaaaattcgcgaacacccggcggtggttgatatctttgaatatgacattccgttcgcgaagcgttacctgatcgataaaggcctgattccgatggaaggtgacgaagaactgaaactgctggcctttgatattgaaacgctgtaccacgaaggcgaagaattcgcaaaaggtccgattatcatgatcagctatgcggacgaagaaggcgccaaagttattacctggaagaaagtcgatctgccgtatgtggaagtcgtgagctctgaacgtgaaatgatcaaacgctttctgaaagtgattcgcgaaaaagatccggacgttattatcacctataacggcgatagtttcgacctgccgtacctggtgaaacgtgccgaaaagctgggtattaaactgccgctgggtcgtgacggttccgaaccgaaaatgcagcgcctgggcgatatgacggcagttgaaatcaaaggtcgcattcattttgatctgtaccacgtgatccgtcgcaccattaatctgccgacctatacgctggaagcagtttacgaagctatcttcggcaagccgaaagaaaaggtctatgcccatgaaattgcagaagcttgggaaacgggcaagggtctggaacgtgtcgctaaatatagcatggaagatgcgaaggtgacctacgaactgggtcgtgaatttttcccgatggaagcacagctgagccgcctggtcggccaaccgctgtgggatgtgtctcgtagttccaccggtaacctggtggaatggtatctgctgcgtaaagcgtatgaacgcaacgaactggcaccgaataaaccgtccggccgcgaatacgatgaacgtcgcggcggttatgcgggcggttacgttaaagaaccggaaaagggtctgtgggaaaacatcgtctacctggattacaagagtctgtatccgtccattatcattacccataacgttagtccggacacgctgaatcgcgaaggctgcaaagaatacgatgtggcgccgcaggttggtcaccgtttttgtaaagactttccgggcttcattccgtccctgctgggtgatctgctggaagaacgtcagaaaatcaagcgcaaaatgaaggccaccattgatccgatcgaacgtcgcctgctggactatcgtcaacgcgcgatcaaaattctggccaacagctattacggctattacggttatgcgcgtgcccgctggtactgcaaagaatgtgcagaaagcgttacggcttggggccgcgaatacatcgaaatgtctatccgtgaaatcgaagaaaagtacggtttcaaggtgctgtacgctgataccgacggcttccatgcgacgattccgggtgaagatgccgaaaccatcaaaaagaaagcaatggaattcctgaagtacatcaactcaaagctgccgggcgccctggaactggaatatgaaggcttctaccgtcgcggctttttcgttacgaagaaaaagtacgcagtcattgacgaagaaggcaaaatcaccacgcgcggtctggaaattgtgcgtcgcgattggagtgaaattgccaaagaaacccaggcacgtgtgctggaagctctgctgaaagatggcaatgttgaagaagcggtttccattgtcaaagaagtgacggaaaagctgggtaaatatgaagtcccgccggaaaaactggtgatccatgaacaaattacccgcgaactgaaggattacaaagcgacgggcccgcacgttgctatcgcgaaacgtctggcagcgcgtggcgtgaagattcgtccgggtaccgttatcagctatattgtcctgaaaggctctggtcgtatcggtgaccgcgcgattccgtttgatgaattcgacccgacgaaacatcgctacgatgcagaatattacatcgaaaaccaggttctgccggctgtcgaacgtattctgaaagcgtttggctatcgtgccgaagatctgcgctaccagaaaacccgtcaagtgggcctgggtgtttggctgcaaccgaaaggtaagaaataa

SEQ ID NO: 514 - DNA, 2325 bp, Artificial Sequence
  Synthetic
atgatcctggacgcaaactacattaccgaagatggcaaaccgattatccgcattttcaagaaggaaaacggcgaatttaaggtggaatatgaccgtaactttcgcccgtatatttacgctctgctgaaagatgacagccagatcgatgaagtgaaaaagattaccgcggaacgtcatggcaaaatcgttcgcattgttgatgtcgaaaaggtcaaaaagaaatttctgggtcgcccgattgaagtgtggaaactgtatttcgaacatccgcaagatgttccggctatccgtgacaaaattcgcgaacacccggcggtggttgatatctttgaatatgacattccgttcgcgaagcgttacctgatcgataaaggcctgattccgatggaaggtgacgaagaactgaaactgctggcctttgatattgaaacgctgtaccacgaaggcgaagaattcgcaaaaggtccgattatcatgatcagctatgcggacgaagaaggcgccaaagttattacctggaagaaagtcgatctgccgtatgtggaagtcgtgagctctgaacgtgaaatgatcaaacgctttctgaaagtgattcgcgaaaaagatccggacgttattatcacctataacggcgatagtttcgacctgccgtacctggtgaaacgtgccgaaaagctgggtattaaactgccgctgggtcgtgacggttccgaaccgaaaatgcagcgcctgggcgatatgacggcagttgaaatcaaaggtcgcattcattttgatctgtaccacgtgatccgtcgcaccattaatctgccgacctatacgctggaagcagtttacgaagctatcttcggcaagccgaaagaaaaggtctatgcccatgaaattgcagaagcttgggaaacgggcaagggtctggaacgtgtcgctaaatatagcatggaagatgcgaaggtgacctacgaactgggtcgtgaatttttcccgatggaagcacagctgagccgcctggtcggccaaccgctgtgggatgtgtctcgtagttccaccggtaacctggtggaatggtatctgctgcgtaaagcgtatgaacgcaacgaactggcaccgaataaaccgtccggccgcgaatacgatgaacgtcgcggcggttatgcgggcggttacgttaaagaaccggaaaagggtctgtgggaaaacatcgtctacctggattacaagagtctgtatccgtccattatcattacccataacgttagtccggacacgctgaatcgcgaaggctgcaaagaatacgatgtggcgccgcaggttggtcaccgtttttgtaaagactttccgggcttcattccgtccctgctgggtgatctgctggaagaacgtcagaaaatcaagcgcaaaatgaaggccaccattgatccgatcgaacgtcgcctgctggactatcgtcaacgcgcgatcaaaattctggccaacagctattacggctattacggttatgcgcgtgcccgctggtactgcaaagaatgtgcagaaagcgttacggcttggggccgcgaatacatcgaaatgtctatccgtgaaatcgaagaaaagtacggtttcaaggtgctgtacgctgataccgacggcttccatgcgacgattccgggtgaagatgccgaaaccatcaaaaagaaagcaatggaattcctgaagtacatcaactcaaagctgccgggcgccctggaactggaatatgaaggcttctaccgtcgcggctttttcgttacgaagaaaaagtacgcagtcattgacgaagaaggcaaaatcaccacgcgcggtctggaaattgtgcgtcgcgattggagtgaaattgccaaagaaacccaggcaaaggttctggaagcaattctgaaacatggtaacgtcgaagaagcggtcaagatcgtgaaagaagttaccgaaaaactgtcgaattatgaaattccggtcgaaaagctggtgatctacgaacaaattacgcgcccgctgaacgaatataaagccattggcccgcacgtggcagttgctaaacgtctggcggccaagggtatcaagattaaaccgggcatggtgattggttatgttgtcctgcgcggcgatggtccgatcagcaaacgtgcgatcgccatcgaagaattcgatggcaaaaagcataagtacgacgcagaatactacatcgaaaatcaggttctgccggccgtcgaacgtatcctgaaagcattcggttataagcgtgaagatctgcgctggcagaagaccaaacaagtgggcctgggtgcgtggctgaaagttaaaaagtcttaa

SEQ ID NO: 515 - DNA, 2328 bp, Artificial Sequence
  Synthetic
atgatcctggacgcaaactacattaccgaagatggcaaaccgattatccgcattttcaagaaggaaaacggcgaatttaaggtggaatatgaccgtaactttcgcccgtatatttacgctctgctgaaagatgacagccagatcgatgaagtgaaaaagattaccgcggaacgtcatggcaaaatcgttcgcattgttgatgtcgaaaaggtcaaaaagaaatttctgggtcgcccgattgaagtgtggaaactgtatttcgaacatccgcaagatgttccggctatccgtgacaaaattcgcgaacacccggcggtggttgatatctttgaatatgacattccgttcgcgaagcgttacctgatcgataaaggcctgattccgatggaaggtgacgaagaactgaaactgctggcctttgatattgaaacgctgtaccacgaaggcgaagaattcgcaaaaggtccgattatcatgatcagctatgcggacgaagaaggcgccaaagttattacctggaagaaagtcgatctgccgtatgtggaagtcgtgagctctgaacgtgaaatgatcaaacgctttctgaaagtgattcgcgaaaaagatccggacgttattatcacctataacggcgatagtttcgacctgccgtacctggtgaaacgtgccgaaaagctgggtattaaactgccgctgggtcgtgacggttccgaaccgaaaatgcagcgcctgggcgatatgacggcagttgaaatcaaaggtcgcattcattttgatctgtaccacgtgatccgtcgcaccattaatctgccgacctatacgctggaagcagtttacgaagctatcttcggcaagccgaaagaaaaggtctatgcccatgaaattgcagaagcttgggaaacgggcaagggtctggaacgtgtcgctaaatatagcatggaagatgcgaaggtgacctacgaactgggtcgtgaatttttcccgatggaagcacagctgagccgcctggtcggccaaccgctgtgggatgtgtctcgtagttccaccggtaacctggtggaatggtatctgctgcgtaaagcgtatgaacgcaacgaactggcaccgaataaaccgtccggccgcgaatacgatgaacgtcgcggcggttatgcgggcggttacgttaaagaaccggaaaagggtctgtgggaaaacatcgtctacctggattacaagagtctgtatccgtccattatcattacccataacgttagtccggacacgctgaatcgcgaaggctgcaaagaatacgatgtggcgccgcaggttggtcaccgtttttgtaaagactttccgggcttcattccgtccctgctgggtgatctgctggaagaacgtcagaaaatcaagcgcaaaatgaaggccaccattgatccgatcgaacgtcgcctgctggactatcgtcaacgcgcgatcaaaattctggccaacagctattacggctattacggttatgcgcgtgcccgctggtactgcaaagaatgtgcagaaagcgttacggcttggggccgcgaatacatcgaaatgtctatccgtgaaatcgaagaaaagtacggtttcaaggtgctgtacgctgataccgacggcttccatgcgacgattccgggtgaagatgccgaaaccatcaaaaagaaagcaatggaattcctgaagtacatcaactcaaagctgccgggcgccctggaactggaatatgaaggcttctaccgtcgcggctttttcgttacgaagaaaaagtacgcagtcattgacgaagaaggcaaaatcaccacgcgcggtctggaaattgtgcgtcgcgattggagtgaaattgccaaagaaacccaggcacgtgttctggaagcactgctgaaagatggtaatgtcgaagaagcagtgagtattgttaaagaagtcacggaaaaactgtccaagtatgaagtcccgccggaaaaactggtgattcatgaacaaatcacccgcgaactgaaagattacaaggcgacgggcccgcacgtggcaattgctaaacgtctggcagcgcgtggcgttaagatccgtccgggtaccgttattagctatatcgtcctgaaaggctctggtcgtattggtgaccgcgccatcccgtttgatgaattcgacccggctaaacaccgctacgatgcggaatattacattgaaaatcaggtcctgccggctgtggaacgtatcctgaaagcgtttggctatcgtaaggaagatctgcgctaccagaaaacccgtcaagtgggcctgggtgcgtggctgaaaccgaagggtaaaaagtaa

SEQ ID NO: 516 - DNA, 2328 bp, Artificial Sequence
  Synthetic
atgatcctggacgcaaactacattaccgaagatggcaaaccgattatccgcattttcaagaaggaaaacggcgaatttaaggtggaatatgaccgtaactttcgcccgtatatttacgctctgctgaaagatgacagccagatcgatgaagtgaaaaagattaccgcggaacgtcatggcaaaatcgttcgcattgttgatgtcgaaaaggtcaaaaagaaatttctgggtcgcccgattgaagtgtggaaactgtatttcgaacatccgcaagatgttccggctatccgtgacaaaattcgcgaacacccggcggtggttgatatctttgaatatgacattccgttcgcgaagcgttacctgatcgataaaggcctgattccgatggaaggtgacgaagaactgaaactgctggcctttgatattgaaacgctgtaccacgaaggcgaagaattcgcaaaaggtccgattatcatgatcagctatgcggacgaagaaggcgccaaagttattacctggaagaaagtcgatctgccgtatgtggaagtcgtgagctctgaacgtgaaatgatcaaacgctttctgaaagtgattcgcgaaaaagatccggacgttattatcacctataacggcgatagtttcgacctgccgtacctggtgaaacgtgccgaaaagctgggtattaaactgccgctgggtcgtgacggttccgaaccgaaaatgcagcgcctgggcgatatgacggcagttgaaatcaaaggtcgcattcattttgatctgtaccacgtgatccgtcgcaccattaatctgccgacctatacgctggaagcagtttacgaagctatcttcggcaagccgaaagaaaaggtctatgcccatgaaattgcagaagcttgggaaacgggcaagggtctggaacgtgtcgctaaatatagcatggaagatgcgaaggtgacctacgaactgggtcgtgaatttttcccgatggaagcacagctgagccgcctggtcggccaaccgctgtgggatgtgtctcgtagttccaccggtaacctggtggaatggtatctgctgcgtaaagcgtatgaacgcaacgaactggcaccgaataaaccgtccggccgcgaatacgatgaacgtcgcggcggttatgcgggcggttacgttaaagaaccggaaaagggtctgtgggaaaacatcgtctacctggattacaagagtctgtatccgtccattatcattacccataacgttagtccggacacgctgaatcgcgaaggctgcaaagaatacgatgtggcgccgcaggttggtcaccgtttttgtaaagactttccgggcttcattccgtccctgctgggtgatctgctggaagaacgtcagaaaatcaagcgcaaaatgaaggccaccattgatccgatcgaacgtcgcctgctggactatcgtcaacgcgcgatcaaaattctggccaacagctattacggctattacggttatgcgcgtgcccgctggtactgcaaagaatgtgcagaaagcgttacggcttggggccgcgaatacatcgaaatgtctatccgtgaaatcgaagaaaagtacggtttcaaggtgctgtacgctgataccgacggcttccatgcgacgattccgggtgaagatgccgaaaccatcaaaaagaaagcaatggaattcctgaagtacatcaactcaaagctgccgggcgccctggaactggaatatgaaggcttctaccgtcgcggctttttcgttacgaagaaaaagtacgcagtcattgacgaagaaggcaaaatcaccacgcgcggtctggaaattgtgcgtcgcgattggagtgaaattgccaaagaaacccaggcacgcgtcctggaagcaatcctgaaagatggtgacgtggaagaagccgtccgtattgtgaaagaagttacggaaaaactgtccaaatatgaagttccgccggaaaaactggtcatccatgaacaaattacccgcgaactgaaagattacaaagcgacgggcccgcacgtcgcaatcgctaaacgtctggcggcgcgtggcgtgaaaattcgtccgggtaccgtgatctcatatattgttctgaaaggctcgggtcgtatcggtgaccgcgctattccgtttgatgaattcgacccgaaaaaacacaaatacgatgcggaatactacatcgaaaaccaggttctgccggccgtcgaacgtattctgcgcgcatttggctaccgtaaagaagatctgcgttatcaaaaaaccaaacaagtgggtctgggtgcgtggctgaaaccgaaaggtaaaaaataa

SEQ ID NO: 517 - DNA, 2325 bp, Artificial Sequence
  Synthetic
atgatcctggacgcaaactacattaccgaagatggcaaaccgattatccgcattttcaagaaggaaaacggcgaatttaaggtggaatatgaccgtaactttcgcccgtatatttacgctctgctgaaagatgacagccagatcgatgaagtgaaaaagattaccgcggaacgtcatggcaaaatcgttcgcattgttgatgtcgaaaaggtcaaaaagaaatttctgggtcgcccgattgaagtgtggaaactgtatttcgaacatccgcaagatgttccggctatccgtgacaaaattcgcgaacacccggcggtggttgatatctttgaatatgacattccgttcgcgaagcgttacctgatcgataaaggcctgattccgatggaaggtgacgaagaactgaaactgctggcctttgatattgaaacgctgtaccacgaaggcgaagaattcgcaaaaggtccgattatcatgatcagctatgcggacgaagaaggcgccaaagttattacctggaagaaagtcgatctgccgtatgtggaagtcgtgagctctgaacgtgaaatgatcaaacgctttctgaaagtgattcgcgaaaaagatccggacgttattatcacctataacggcgatagtttcgacctgccgtacctggtgaaacgtgccgaaaagctgggtattaaactgccgctgggtcgtgacggttccgaaccgaaaatgcagcgcctgggcgatatgacggcagttgaaatcaaaggtcgcattcattttgatctgtaccacgtgatccgtcgcaccattaatctgccgacctatacgctggaagcagtttacgaagctatcttcggcaagccgaaagaaaaggtctatgcccatgaaattgcagaagcttgggaaacgggcaagggtctggaacgtgtcgctaaatatagcatggaagatgcgaaggtgacctacgaactgggtcgtgaatttttcccgatggaagcacagctgagccgcctggtcggccaaccgctgtgggatgtgtctcgtagttccaccggtaacctggtggaatggtatctgctgcgtaaagcgtatgaacgcaacgaactggcaccgaataaaccgtccggccgcgaatacgatgaacgtcgcggcggttatgcgggcggttacgttaaagaaccggaaaagggtctgtgggaaaacatcgtctacctggattacaagagtctgtatccgtccattatcattacccataacgttagtccggacacgctgaatcgcgaaggctgcaaagaatacgatgtggcgccgcaggttggtcaccgtttttgtaaagactttccgggcttcattccgtccctgctgggtgatctgctggaagaacgtcagaaaatcaagcgcaaaatgaaggccaccattgatccgatcgaacgtcgcctgctggactatcgtcaacgcgcgatcaaaattctggccaacagctattacggctattacggttatgcgcgtgcccgctggtactgcaaagaatgtgcagaaagcgttacggcttggggccgcgaatacatcgaaatgtctatccgtgaaatcgaagaaaagtacggtttcaaggtgctgtacgctgataccgacggcttccatgcgacgattccgggtgaagatgccgaaaccatcaaaaagaaagcaatggaattcctgaagtacatcaactcaaagctgccgggcgccctggaactggaatatgaaggcttctaccgtcgcggctttttcgttacgaagaaaaagtacgcagtcattgacgaagaaggcaaaatcaccacgcgcggtctggaaattgtgcgtcgcgattggagtgaaattgccaaagaaacccaggcacgtgttctggaagcaattctgaaacatggtaacgtcgaagaagcggtcaaaatcgtgaaagaagttacggaaaaactgtctaactacgaaattccgccggaaaaactggccatctacgaacaaattacccgcccgctgcatgaatataaagcaatcggtccgcacgtcgcagtggcaaaacgtctggcagcacgcggcgttaaagtcaaaccgggtatggtcatcggctatattgtgctgcgtggtgatggcccgatcagcaaccgcgcaattctggctgaagaatacgatctgaaaaaacacaaatacgacgccgaatattacatcgaaaatcaggttctgccggctgtcctgcgtattctggaagcgtttggctatcgtaaagaagatctgcgctggcagaaaacccgtcaaacgggtctgacctcatggctgaatattaaaaaatcgtaa

SEQ ID NO: 518 - DNA, 2325 bp, Artificial Sequence
  Synthetic
atgatcctggacgcaaactacattaccgaagatggcaaaccgattatccgcattttcaagaaggaaaacggcgaatttaaggtggaatatgaccgtaactttcgcccgtatatttacgctctgctgaaagatgacagccagatcgatgaagtgaaaaagattaccgcggaacgtcatggcaaaatcgttcgcattgttgatgtcgaaaaggtcaaaaagaaatttctgggtcgcccgattgaagtgtggaaactgtatttcgaacatccgcaagatgttccggctatccgtgacaaaattcgcgaacacccggcggtggttgatatctttgaatatgacattccgttcgcgaagcgttacctgatcgataaaggcctgattccgatggaaggtgacgaagaactgaaactgctggcctttgatattgaaacgctgtaccacgaaggcgaagaattcgcaaaaggtccgattatcatgatcagctatgcggacgaagaaggcgccaaagttattacctggaagaaagtcgatctgccgtatgtggaagtcgtgagctctgaacgtgaaatgatcaaacgctttctgaaagtgattcgcgaaaaagatccggacgttattatcacctataacggcgatagtttcgacctgccgtacctggtgaaacgtgccgaaaagctgggtattaaactgccgctgggtcgtgacggttccgaaccgaaaatgcagcgcctgggcgatatgacggcagttgaaatcaaaggtcgcattcattttgatctgtaccacgtgatccgtcgcaccattaatctgccgacctatacgctggaagcagtttacgaagctatcttcggcaagccgaaagaaaaggtctatgcccatgaaattgcagaagcttgggaaacgggcaagggtctggaacgtgtcgctaaatatagcatggaagatgcgaaggtgacctacgaactgggtcgtgaatttttcccgatggaagcacagctgagccgcctggtcggccaaccgctgtgggatgtgtctcgtagttccaccggtaacctggtggaatggtatctgctgcgtaaagcgtatgaacgcaacgaactggcaccgaataaaccgtccggccgcgaatacgatgaacgtcgcggcggttatgcgggcggttacgttaaagaaccggaaaagggtctgtgggaaaacatcgtctacctggattacaagagtctgtatccgtccattatcattacccataacgttagtccggacacgctgaatcgcgaaggctgcaaagaatacgatgtggcgccgcaggttggtcaccgtttttgtaaagactttccgggcttcattccgtccctgctgggtgatctgctggaagaacgtcagaaaatcaagcgcaaaatgaaggccaccattgatccgatcgaacgtcgcctgctggactatcgtcaacgcgcgatcaaaattctggccaacagctattacggctattacggttatgcgcgtgcccgctggtactgcaaagaatgtgcagaaagcgttacggcttggggccgcgaatacatcgaaatgtctatccgtgaaatcgaagaaaagtacggtttcaaggtgctgtacgctgataccgacggcttccatgcgacgattccgggtgaagatgccgaaaccatcaaaaagaaagcaatggaattcctgaagtacatcaactcaaagctgccgggcgccctggaactggaatatgaaggcttctaccgtcgcggctttttcgttacgaagaaaaagtacgcagtcattgacgaagaaggcaaaatcaccacgcgcggtctggaaattgtgcgtcgcgattggagtgaaattgccaaagaaacccaggcaaaagttctggaagcaatcctgaaacatggtaatgtcgaagaagcagtgaaaattgtcaaggaagtgacggaaaaactgtcgaagtatgaaatcccgccggaaaaactggtgatctacgaacaaattacccgcccgctgcatgaatataaagcgattggcccgcacgtggcagttgctaaacgtctggcagcccgcggtgtcaaagtgcgtccgggcatggtgatcggttatattgttctgcgtggcgatggtccgatcagtaaacgcgcgattctggccgaagaatttgatccgcgcaaacacaagtacgacgccgaatattacatcgaaaaccaggtgctgccggctgttctgcgtattctggaagcgttcggctatcgtaaagaagatctgcgctggcagaaaaccaagcaaacgggtctgaccgcatggctgaatgtgaaaaagaaataa

SEQ ID NO: 519 - DNA, 2331 bp, Artificial Sequence
  Synthetic
atgatcctggacgcaaactacattaccgaagatggcaaaccgattatccgcattttcaagaaggaaaacggcgaatttaaggtggaatatgaccgtaactttcgcccgtatatttacgctctgctgaaagatgacagccagatcgatgaagtgaaaaagattaccgcggaacgtcatggcaaaatcgttcgcattgttgatgtcgaaaaggtcaaaaagaaatttctgggtcgcccgattgaagtgtggaaactgtatttcgaacatccgcaagatgttccggctatccgtgacaaaattcgcgaacacccggcggtggttgatatctttgaatatgacattccgttcgcgaagcgttacctgatcgataaaggcctgattccgatggaaggtgacgaagaactgaaactgctggcctttgatattgaaacgctgtaccacgaaggcgaagaattcgcaaaaggtccgattatcatgatcagctatgcggacgaagaaggcgccaaagttattacctggaagaaagtcgatctgccgtatgtggaagtcgtgagctctgaacgtgaaatgatcaaacgctttctgaaagtgattcgcgaaaaagatccggacgttattatcacctataacggcgatagtttcgacctgccgtacctggtgaaacgtgccgaaaagctgggtattaaactgccgctgggtcgtgacggttccgaaccgaaaatgcagcgcctgggcgatatgacggcagttgaaatcaaaggtcgcattcattttgatctgtaccacgtgatccgtcgcaccattaatctgccgacctatacgctggaagcagtttacgaagctatcttcggcaagccgaaagaaaaggtctatgcccatgaaattgcagaagcttgggaaacgggcaagggtctggaacgtgtcgctaaatatagcatggaagatgcgaaggtgacctacgaactgggtcgtgaatttttcccgatggaagcacagctgagccgcctggtcggccaaccgctgtgggatgtgtctcgtagttccaccggtaacctggtggaatggtatctgctgcgtaaagcgtatgaacgcaacgaactggcgccgaataaaccggatgaacgcgaatatgaacgtcgcctgcgtgaaagttatgaaggcggttacgttaaagaaccggaacgcggcctgtgggaaggtattgtgtcactggattttcgtagtctgtacccgtccattatcattacccataacgtttcgccggatacgctgaataaagaaggctgcggtgaatatgacgaagccccggaagtgggtcaccgcttctgtaaagattttccgggcttcattccgtcactgctgggttcgctgctggaagaacgccagaagatcaagaaacgtatgaaggaatctaaggatccggtggaacgcaaactgctggactatcgtcaacgcgcgatcaagattctggccaacagcttttatggctattacggttacgcgaaagcccgttggtactgcaaggaatgtgcagaaagcgtgaccgcttggggccgccagtatattgaactggtccgtcgcgaactggaagaacgtggttttaaagtgctgtatatcgataccgacggcctgtacgccacgattccgggtgaaaagaactgggaagaaatcaagcgtcgcgcactggaatttgttaactacatcaattccaaactgccgggcattctggaactggaatatgaaggcttctacacccgtggctttttcgtgacgaagaaaaagtatgcgctgatcgatgaagaaggcaaaattgtcacccgtggtctggaaatcgtgcgtcgcgattggagtgaaattgccaaagaaacccaggcacgcgttctggaagcaatcctgcgtcatggtgacgtcgaagaagccgttcgcattgtcaaagatgtgacggaaaagctgtcgaaatatgaagtcccgccggaaaaactggtgatccatgaacaaattacccgtgaactgaaggattacaaagcgacgggcccgcacgttgcaattgctaaacgcctggcagcccgtggcatcaagattcgtccgggtaccgttatcagctatattgtcctgaaaggctctggtcgcatcggtgatcgtgctattccgtttgatgaattcgacccgacgaaacaccgttacgatgccgaatattacatcgaaaatcaggtgctgccggccgttgaacgcattctgaaagcatttggctataagaaagaagaactgcgctaccagaaaacccgtcaagtgggcctgggtgcgtggctgaagctgaaaggtaagaaataa

SEQ ID NO: 520 - DNA, 2325 bp, Artificial Sequence
  Synthetic
atgatcctggacgcaaactacattaccgaagatggcaaaccgattatccgcattttcaagaaggaaaacggcgaatttaaggtggaatatgaccgtaactttcgcccgtatatttacgctctgctgaaagatgacagccagatcgatgaagtgaaaaagattaccgcggaacgtcatggcaaaatcgttcgcattgttgatgtcgaaaaggtcaaaaagaaatttctgggtcgcccgattgaagtgtggaaactgtatttcgaacatccgcaagatgttccggctatccgtgacaaaattcgcgaacacccggcggtggttgatatctttgaatatgacattccgttcgcgaagcgttacctgatcgataaaggcctgattccgatggaaggtgacgaagaactgaaactgctggcctttgatattgaaacgctgtaccacgaaggcgaagaattcgcaaaaggtccgattatcatgatcagctatgcggacgaagaaggcgccaaagttattacctggaagaaagtcgatctgccgtatgtggaagtcgtgagctctgaacgtgaaatgatcaaacgctttctgaaagtgattcgcgaaaaagatccggacgttattatcacctataacggcgatagtttcgacctgccgtacctggtgaaacgtgccgaaaagctgggtattaaactgccgctgggtcgtgacggttccgaaccgaaaatgcagcgcctgggcgatatgacggcagttgaaatcaaaggtcgcattcattttgatctgtaccacgtgatccgtcgcaccattaatctgccgacctatacgctggaagcagtttacgaagctatcttcggcaagccgaaagaaaaggtctatgcccatgaaattgcagaagcttgggaaacgggcaagggtctggaacgtgtcgctaaatatagcatggaagatgcgaaggtgacctacgaactgggtcgtgaatttttcccgatggaagcacagctgagccgcctggtcggccaaccgctgtgggatgtgtctcgtagttccaccggtaacctggtggaatggtatctgctgcgtaaagcgtatgaacgcaacgaactggcgccgaataaaccggatgaacgcgaatatgaacgtcgcctgcgtgaaagttatgaaggcggttacgttaaagaaccggaacgcggcctgtgggaaggtattgtgtcactggattttcgtagtctgtacccgtccattatcattacccataacgtttcgccggatacgctgaataaagaaggctgcggtgaatatgacgaagccccggaagtgggtcaccgcttctgtaaagattttccgggcttcattccgtcactgctgggttcgctgctggaagaacgccagaagatcaagaaacgtatgaaggaatctaaggatccggtggaacgcaaactgctggactatcgtcaacgcgcgatcaagattctggccaacagcttttatggctattacggttacgcgaaagcccgttggtactgcaaggaatgtgcagaaagcgtgaccgcttggggccgccagtatattgaactggtccgtcgcgaactggaagaacgtggttttaaagtgctgtatatcgataccgacggcctgtacgccacgattccgggtgaaaagaactgggaagaaatcaagcgtcgcgcactggaatttgttaactacatcaattccaaactgccgggcattctggaactggaatatgaaggcttctacacccgtggctttttcgtgacgaagaaaaagtatgcgctgatcgatgaagaaggcaaaattgtcacccgtggtctggaaatcgtgcgtcgcgattggagtgaaattgccaaagaaacccaggcacgtgtcctggaagcaatcctgaaacatggtgatgtggaagaagcggttcgcattgtcaaagaagtgacggaaaagctgtcgaaatatgaagttccgccggaaaaactggtcatccatgaacaaattacccgcgatctgcgtgactacaaagccacgggtccgcacgtggcagttgcaaaacgtctggcagcccgtggcgtgaagattcgtccgggtaccgtgatcagttatattgttctgaaaggctccggtcgcatcggtgaccgtgctattccgtttgatgaattcgacccgacgaaacaccgttacgatgccgaatattacatcgaaaatcaggtcctgccggccgtggaacgcattctgaaagcatttggttatcgcaaggaagatctgcgttaccagaagaccaaacaagtcggcctgggtgcgtggctgaaagtgaaaaagtaa

SEQ ID NO: 521 - DNA, 2331 bp, Artificial Sequence
  Synthetic
atgatcctggacgcaaactacattaccgaagatggcaaaccgattatccgcattttcaagaaggaaaacggcgaatttaaggtggaatatgaccgtaactttcgcccgtatatttacgctctgctgaaagatgacagccagatcgatgaagtgaaaaagattaccgcggaacgtcatggcaaaatcgttcgcattgttgatgtcgaaaaggtcaaaaagaaatttctgggtcgcccgattgaagtgtggaaactgtatttcgaacatccgcaagatgttccggctatccgtgacaaaattcgcgaacacccggcggtggttgatatctttgaatatgacattccgttcgcgaagcgttacctgatcgataaaggcctgattccgatggaaggtgacgaagaactgaaactgctggcctttgatattgaaacgctgtaccacgaaggcgaagaattcgcaaaaggtccgattatcatgatcagctatgcggacgaagaaggcgccaaagttattacctggaagaaagtcgatctgccgtatgtggaagtcgtgagctctgaacgtgaaatgatcaaacgctttctgaaagtgattcgcgaaaaagatccggacgttattatcacctataacggcgatagtttcgacctgccgtacctggtgaaacgtgccgaaaagctgggtattaaactgccgctgggtcgtgacggttccgaaccgaaaatgcagcgcctgggcgatatgacggcagttgaaatcaaaggtcgcattcattttgatctgtaccacgtgatccgtcgcaccattaatctgccgacctatacgctggaagcagtttacgaagctatcttcggcaagccgaaagaaaaggtctatgcccatgaaattgcagaagcttgggaaacgggcaagggtctggaacgtgtcgctaaatatagcatggaagatgcgaaggtgacctacgaactgggtcgtgaatttttcccgatggaagcacagctgagccgcctggtcggccaaccgctgtgggatgtgtctcgtagttccaccggtaacctggtggaatggtatctgctgcgtaaagcgtatgaacgcaacgaactggcgccgaataaaccggatgaacgcgaatatgaacgtcgcctgcgtgaaagttatgaaggcggttacgttaaagaaccggaacgcggcctgtgggaaggtattgtgtcactggattttcgtagtctgtacccgtccattatcattacccataacgtttcgccggatacgctgaataaagaaggctgcggtgaatatgacgaagccccggaagtgggtcaccgcttctgtaaagattttccgggcttcattccgtcactgctgggttcgctgctggaagaacgccagaagatcaagaaacgtatgaaggaatctaaggatccggtggaacgcaaactgctggactatcgtcaacgcgcgatcaagattctggccaacagcttttatggctattacggttacgcgaaagcccgttggtactgcaaggaatgtgcagaaagcgtgaccgcttggggccgccagtatattgaactggtccgtcgcgaactggaagaacgtggttttaaagtgctgtatatcgataccgacggcctgtacgccacgattccgggtgaaaagaactgggaagaaatcaagcgtcgcgcactggaatttgttaactacatcaattccaaactgccgggcattctggaactggaatatgaaggcttctacacccgtggctttttcgtgacgaagaaaaagtatgcgctgatcgatgaagaaggcaaaattgtcacccgtggtctggaaatcgtgcgtcgcgattggagtgaaattgccaaagaaacccaggcacgtgtgctggaagctctgctgaaagatggcaatgttgaagaagcggtttccattgtcaaagaagtgacggaaaagctgggtaaatatgaagtcccgccggaaaaactggtgatccatgaacaaattacccgcgaactgaaggattacaaagcgacgggcccgcacgttgctatcgcgaaacgtctggcagcgcgtggcgtgaagattcgtccgggtaccgttatcagctatattgtcctgaaaggctctggtcgtatcggtgaccgcgcgattccgtttgatgaattcgacccgacgaaacatcgctacgatgcagaatattacatcgaaaaccaggttctgccggctgtcgaacgtattctgaaagcgtttggctatcgtgccgaagatctgcgctaccagaaaacccgtcaagtgggcctgggtgtttggctgcaaccgaaaggtaagaaataa

SEQ ID NO: 522 - DNA, 2328 bp, Artificial Sequence
  Synthetic
atgatcctggacgcaaactacattaccgaagatggcaaaccgattatccgcattttcaagaaggaaaacggcgaatttaaggtggaatatgaccgtaactttcgcccgtatatttacgctctgctgaaagatgacagccagatcgatgaagtgaaaaagattaccgcggaacgtcatggcaaaatcgttcgcattgttgatgtcgaaaaggtcaaaaagaaatttctgggtcgcccgattgaagtgtggaaactgtatttcgaacatccgcaagatgttccggctatccgtgacaaaattcgcgaacacccggcggtggttgatatctttgaatatgacattccgttcgcgaagcgttacctgatcgataaaggcctgattccgatggaaggtgacgaagaactgaaactgctggcctttgatattgaaacgctgtaccacgaaggcgaagaattcgcaaaaggtccgattatcatgatcagctatgcggacgaagaaggcgccaaagttattacctggaagaaagtcgatctgccgtatgtggaagtcgtgagctctgaacgtgaaatgatcaaacgctttctgaaagtgattcgcgaaaaagatccggacgttattatcacctataacggcgatagtttcgacctgccgtacctggtgaaacgtgccgaaaagctgggtattaaactgccgctgggtcgtgacggttccgaaccgaaaatgcagcgcctgggcgatatgacggcagttgaaatcaaaggtcgcattcattttgatctgtaccacgtgatccgtcgcaccattaatctgccgacctatacgctggaagcagtttacgaagctatcttcggcaagccgaaagaaaaggtctatgcccatgaaattgcagaagcttgggaaacgggcaagggtctggaacgtgtcgctaaatatagcatggaagatgcgaaggtgacctacgaactgggtcgtgaatttttcccgatggaagcacagctgagccgcctggtcggccaaccgctgtgggatgtgtctcgtagttccaccggtaacctggtggaatggtatctgctgcgtaaagcgtatgaacgcaacgaactggcgccgaataaaccggatgaacgcgaatatgaacgtcgcctgcgtgaaagttatgaaggcggttacgttaaagaaccggaacgcggcctgtgggaaggtattgtgtcactggattttcgtagtctgtacccgtccattatcattacccataacgtttcgccggatacgctgaataaagaaggctgcggtgaatatgacgaagccccggaagtgggtcaccgcttctgtaaagattttccgggcttcattccgtcactgctgggttcgctgctggaagaacgccagaagatcaagaaacgtatgaaggaatctaaggatccggtggaacgcaaactgctggactatcgtcaacgcgcgatcaagattctggccaacagcttttatggctattacggttacgcgaaagcccgttggtactgcaaggaatgtgcagaaagcgtgaccgcttggggccgccagtatattgaactggtccgtcgcgaactggaagaacgtggttttaaagtgctgtatatcgataccgacggcctgtacgccacgattccgggtgaaaagaactgggaagaaatcaagcgtcgcgcactggaatttgttaactacatcaattccaaactgccgggcattctggaactggaatatgaaggcttctacacccgtggctttttcgtgacgaagaaaaagtatgcgctgatcgatgaagaaggcaaaattgtcacccgtggtctggaaatcgtgcgtcgcgattggagtgaaattgccaaagaaacccaggcaaaggttctggaagcaattctgaaacatggtaacgtcgaagaagcggtcaagatcgtgaaagaagttaccgaaaaactgtcgaattatgaaattccggtcgaaaagctggtgatctacgaacaaattacgcgcccgctgaacgaatataaagccattggcccgcacgtggcagttgctaaacgtctggcggccaagggtatcaagattaaaccgggcatggtgattggttatgttgtcctgcgcggcgatggtccgatcagcaaacgtgcgatcgccatcgaagaattcgatggcaaaaagcataagtacgacgcagaatactacatcgaaaatcaggttctgccggccgtcgaacgtatcctgaaagcattcggttataagcgtgaagatctgcgctggcagaagaccaaacaagtgggcctgggtgcgtggctgaaagttaaaaagtcttaa

SEQ ID NO: 523 - DNA, 2331 bp, Artificial Sequence
  Synthetic
atgatcctggacgcaaactacattaccgaagatggcaaaccgattatccgcattttcaagaaggaaaacggcgaatttaaggtggaatatgaccgtaactttcgcccgtatatttacgctctgctgaaagatgacagccagatcgatgaagtgaaaaagattaccgcggaacgtcatggcaaaatcgttcgcattgttgatgtcgaaaaggtcaaaaagaaatttctgggtcgcccgattgaagtgtggaaactgtatttcgaacatccgcaagatgttccggctatccgtgacaaaattcgcgaacacccggcggtggttgatatctttgaatatgacattccgttcgcgaagcgttacctgatcgataaaggcctgattccgatggaaggtgacgaagaactgaaactgctggcctttgatattgaaacgctgtaccacgaaggcgaagaattcgcaaaaggtccgattatcatgatcagctatgcggacgaagaaggcgccaaagttattacctggaagaaagtcgatctgccgtatgtggaagtcgtgagctctgaacgtgaaatgatcaaacgctttctgaaagtgattcgcgaaaaagatccggacgttattatcacctataacggcgatagtttcgacctgccgtacctggtgaaacgtgccgaaaagctgggtattaaactgccgctgggtcgtgacggttccgaaccgaaaatgcagcgcctgggcgatatgacggcagttgaaatcaaaggtcgcattcattttgatctgtaccacgtgatccgtcgcaccattaatctgccgacctatacgctggaagcagtttacgaagctatcttcggcaagccgaaagaaaaggtctatgcccatgaaattgcagaagcttgggaaacgggcaagggtctggaacgtgtcgctaaatatagcatggaagatgcgaaggtgacctacgaactgggtcgtgaatttttcccgatggaagcacagctgagccgcctggtcggccaaccgctgtgggatgtgtctcgtagttccaccggtaacctggtggaatggtatctgctgcgtaaagcgtatgaacgcaacgaactggcgccgaataaaccggatgaacgcgaatatgaacgtcgcctgcgtgaaagttatgaaggcggttacgttaaagaaccggaacgcggcctgtgggaaggtattgtgtcactggattttcgtagtctgtacccgtccattatcattacccataacgtttcgccggatacgctgaataaagaaggctgcggtgaatatgacgaagccccggaagtgggtcaccgcttctgtaaagattttccgggcttcattccgtcactgctgggttcgctgctggaagaacgccagaagatcaagaaacgtatgaaggaatctaaggatccggtggaacgcaaactgctggactatcgtcaacgcgcgatcaagattctggccaacagcttttatggctattacggttacgcgaaagcccgttggtactgcaaggaatgtgcagaaagcgtgaccgcttggggccgccagtatattgaactggtccgtcgcgaactggaagaacgtggttttaaagtgctgtatatcgataccgacggcctgtacgccacgattccgggtgaaaagaactgggaagaaatcaagcgtcgcgcactggaatttgttaactacatcaattccaaactgccgggcattctggaactggaatatgaaggcttctacacccgtggctttttcgtgacgaagaaaaagtatgcgctgatcgatgaagaaggcaaaattgtcacccgtggtctggaaatcgtgcgtcgcgattggagtgaaattgccaaagaaacccaggcacgtgttctggaagcactgctgaaagatggtaatgtcgaagaagcagtgagtattgttaaagaagtcacggaaaaactgtccaagtatgaagtcccgccggaaaaactggtgattcatgaacaaatcacccgcgaactgaaagattacaaggcgacgggcccgcacgtggcaattgctaaacgtctggcagcgcgtggcgttaagatccgtccgggtaccgttattagctatatcgtcctgaaaggctctggtcgtattggtgaccgcgccatcccgtttgatgaattcgacccggctaaacaccgctacgatgcggaatattacattgaaaatcaggtcctgccggctgtggaacgtatcctgaaagcgtttggctatcgtaaggaagatctgcgctaccagaaaacccgtcaagtgggcctgggtgcgtggctgaaaccgaagggtaaaaagtaa

SEQ ID NO: 524 - DNA, 2331 bp, Artificial Sequence
  Synthetic
atgatcctggacgcaaactacattaccgaagatggcaaaccgattatccgcattttcaagaaggaaaacggcgaatttaaggtggaatatgaccgtaactttcgcccgtatatttacgctctgctgaaagatgacagccagatcgatgaagtgaaaaagattaccgcggaacgtcatggcaaaatcgttcgcattgttgatgtcgaaaaggtcaaaaagaaatttctgggtcgcccgattgaagtgtggaaactgtatttcgaacatccgcaagatgttccggctatccgtgacaaaattcgcgaacacccggcggtggttgatatctttgaatatgacattccgttcgcgaagcgttacctgatcgataaaggcctgattccgatggaaggtgacgaagaactgaaactgctggcctttgatattgaaacgctgtaccacgaaggcgaagaattcgcaaaaggtccgattatcatgatcagctatgcggacgaagaaggcgccaaagttattacctggaagaaagtcgatctgccgtatgtggaagtcgtgagctctgaacgtgaaatgatcaaacgctttctgaaagtgattcgcgaaaaagatccggacgttattatcacctataacggcgatagtttcgacctgccgtacctggtgaaacgtgccgaaaagctgggtattaaactgccgctgggtcgtgacggttccgaaccgaaaatgcagcgcctgggcgatatgacggcagttgaaatcaaaggtcgcattcattttgatctgtaccacgtgatccgtcgcaccattaatctgccgacctatacgctggaagcagtttacgaagctatcttcggcaagccgaaagaaaaggtctatgcccatgaaattgcagaagcttgggaaacgggcaagggtctggaacgtgtcgctaaatatagcatggaagatgcgaaggtgacctacgaactgggtcgtgaatttttcccgatggaagcacagctgagccgcctggtcggccaaccgctgtgggatgtgtctcgtagttccaccggtaacctggtggaatggtatctgctgcgtaaagcgtatgaacgcaacgaactggcgccgaataaaccggatgaacgcgaatatgaacgtcgcctgcgtgaaagttatgaaggcggttacgttaaagaaccggaacgcggcctgtgggaaggtattgtgtcactggattttcgtagtctgtacccgtccattatcattacccataacgtttcgccggatacgctgaataaagaaggctgcggtgaatatgacgaagccccggaagtgggtcaccgcttctgtaaagattttccgggcttcattccgtcactgctgggttcgctgctggaagaacgccagaagatcaagaaacgtatgaaggaatctaaggatccggtggaacgcaaactgctggactatcgtcaacgcgcgatcaagattctggccaacagcttttatggctattacggttacgcgaaagcccgttggtactgcaaggaatgtgcagaaagcgtgaccgcttggggccgccagtatattgaactggtccgtcgcgaactggaagaacgtggttttaaagtgctgtatatcgataccgacggcctgtacgccacgattccgggtgaaaagaactgggaagaaatcaagcgtcgcgcactggaatttgttaactacatcaattccaaactgccgggcattctggaactggaatatgaaggcttctacacccgtggctttttcgtgacgaagaaaaagtatgcgctgatcgatgaagaaggcaaaattgtcacccgtggtctggaaatcgtgcgtcgcgattggagtgaaattgccaaagaaacccaggcacgcgtcctggaagcaatcctgaaagatggtgacgtggaagaagccgtccgtattgtgaaagaagttacggaaaaactgtccaaatatgaagttccgccggaaaaactggtcatccatgaacaaattacccgcgaactgaaagattacaaagcgacgggcccgcacgtcgcaatcgctaaacgtctggcggcgcgtggcgtgaaaattcgtccgggtaccgtgatctcatatattgttctgaaaggctcgggtcgtatcggtgaccgcgctattccgtttgatgaattcgacccgaaaaaacacaaatacgatgcggaatactacatcgaaaaccaggttctgccggccgtcgaacgtattctgcgcgcatttggctaccgtaaagaagatctgcgttatcaaaaaaccaaacaagtgggtctgggtgcgtggctgaaaccgaaaggtaaaaaataa

SEQ ID NO: 525 - DNA, 2328 bp, Artificial Sequence
  Synthetic
atgatcctggacgcaaactacattaccgaagatggcaaaccgattatccgcattttcaagaaggaaaacggcgaatttaaggtggaatatgaccgtaactttcgcccgtatatttacgctctgctgaaagatgacagccagatcgatgaagtgaaaaagattaccgcggaacgtcatggcaaaatcgttcgcattgttgatgtcgaaaaggtcaaaaagaaatttctgggtcgcccgattgaagtgtggaaactgtatttcgaacatccgcaagatgttccggctatccgtgacaaaattcgcgaacacccggcggtggttgatatctttgaatatgacattccgttcgcgaagcgttacctgatcgataaaggcctgattccgatggaaggtgacgaagaactgaaactgctggcctttgatattgaaacgctgtaccacgaaggcgaagaattcgcaaaaggtccgattatcatgatcagctatgcggacgaagaaggcgccaaagttattacctggaagaaagtcgatctgccgtatgtggaagtcgtgagctctgaacgtgaaatgatcaaacgctttctgaaagtgattcgcgaaaaagatccggacgttattatcacctataacggcgatagtttcgacctgccgtacctggtgaaacgtgccgaaaagctgggtattaaactgccgctgggtcgtgacggttccgaaccgaaaatgcagcgcctgggcgatatgacggcagttgaaatcaaaggtcgcattcattttgatctgtaccacgtgatccgtcgcaccattaatctgccgacctatacgctggaagcagtttacgaagctatcttcggcaagccgaaagaaaaggtctatgcccatgaaattgcagaagcttgggaaacgggcaagggtctggaacgtgtcgctaaatatagcatggaagatgcgaaggtgacctacgaactgggtcgtgaatttttcccgatggaagcacagctgagccgcctggtcggccaaccgctgtgggatgtgtctcgtagttccaccggtaacctggtggaatggtatctgctgcgtaaagcgtatgaacgcaacgaactggcgccgaataaaccggatgaacgcgaatatgaacgtcgcctgcgtgaaagttatgaaggcggttacgttaaagaaccggaacgcggcctgtgggaaggtattgtgtcactggattttcgtagtctgtacccgtccattatcattacccataacgtttcgccggatacgctgaataaagaaggctgcggtgaatatgacgaagccccggaagtgggtcaccgcttctgtaaagattttccgggcttcattccgtcactgctgggttcgctgctggaagaacgccagaagatcaagaaacgtatgaaggaatctaaggatccggtggaacgcaaactgctggactatcgtcaacgcgcgatcaagattctggccaacagcttttatggctattacggttacgcgaaagcccgttggtactgcaaggaatgtgcagaaagcgtgaccgcttggggccgccagtatattgaactggtccgtcgcgaactggaagaacgtggttttaaagtgctgtatatcgataccgacggcctgtacgccacgattccgggtgaaaagaactgggaagaaatcaagcgtcgcgcactggaatttgttaactacatcaattccaaactgccgggcattctggaactggaatatgaaggcttctacacccgtggctttttcgtgacgaagaaaaagtatgcgctgatcgatgaagaaggcaaaattgtcacccgtggtctggaaatcgtgcgtcgcgattggagtgaaattgccaaagaaacccaggcacgtgttctggaagcaattctgaaacatggtaacgtcgaagaagcggtcaaaatcgtgaaagaagttacggaaaaactgtctaactacgaaattccgccggaaaaactggccatctacgaacaaattacccgcccgctgcatgaatataaagcaatcggtccgcacgtcgcagtggcaaaacgtctggcagcacgcggcgttaaagtcaaaccgggtatggtcatcggctatattgtgctgcgtggtgatggcccgatcagcaaccgcgcaattctggctgaagaatacgatctgaaaaaacacaaatacgacgccgaatattacatcgaaaatcaggttctgccggctgtcctgcgtattctggaagcgtttggctatcgtaaagaagatctgcgctggcagaaaacccgtcaaacgggtctgacctcatggctgaatattaaaaaatcgtaa

SEQ ID NO: 526 - DNA, 2328 bp, Artificial Sequence
  Synthetic
atgatcctggacgcaaactacattaccgaagatggcaaaccgattatccgcattttcaagaaggaaaacggcgaatttaaggtggaatatgaccgtaactttcgcccgtatatttacgctctgctgaaagatgacagccagatcgatgaagtgaaaaagattaccgcggaacgtcatggcaaaatcgttcgcattgttgatgtcgaaaaggtcaaaaagaaatttctgggtcgcccgattgaagtgtggaaactgtatttcgaacatccgcaagatgttccggctatccgtgacaaaattcgcgaacacccggcggtggttgatatctttgaatatgacattccgttcgcgaagcgttacctgatcgataaaggcctgattccgatggaaggtgacgaagaactgaaactgctggcctttgatattgaaacgctgtaccacgaaggcgaagaattcgcaaaaggtccgattatcatgatcagctatgcggacgaagaaggcgccaaagttattacctggaagaaagtcgatctgccgtatgtggaagtcgtgagctctgaacgtgaaatgatcaaacgctttctgaaagtgattcgcgaaaaagatccggacgttattatcacctataacggcgatagtttcgacctgccgtacctggtgaaacgtgccgaaaagctgggtattaaactgccgctgggtcgtgacggttccgaaccgaaaatgcagcgcctgggcgatatgacggcagttgaaatcaaaggtcgcattcattttgatctgtaccacgtgatccgtcgcaccattaatctgccgacctatacgctggaagcagtttacgaagctatcttcggcaagccgaaagaaaaggtctatgcccatgaaattgcagaagcttgggaaacgggcaagggtctggaacgtgtcgctaaatatagcatggaagatgcgaaggtgacctacgaactgggtcgtgaatttttcccgatggaagcacagctgagccgcctggtcggccaaccgctgtgggatgtgtctcgtagttccaccggtaacctggtggaatggtatctgctgcgtaaagcgtatgaacgcaacgaactggcgccgaataaaccggatgaacgcgaatatgaacgtcgcctgcgtgaaagttatgaaggcggttacgttaaagaaccggaacgcggcctgtgggaaggtattgtgtcactggattttcgtagtctgtacccgtccattatcattacccataacgtttcgccggatacgctgaataaagaaggctgcggtgaatatgacgaagccccggaagtgggtcaccgcttctgtaaagattttccgggcttcattccgtcactgctgggttcgctgctggaagaacgccagaagatcaagaaacgtatgaaggaatctaaggatccggtggaacgcaaactgctggactatcgtcaacgcgcgatcaagattctggccaacagcttttatggctattacggttacgcgaaagcccgttggtactgcaaggaatgtgcagaaagcgtgaccgcttggggccgccagtatattgaactggtccgtcgcgaactggaagaacgtggttttaaagtgctgtatatcgataccgacggcctgtacgccacgattccgggtgaaaagaactgggaagaaatcaagcgtcgcgcactggaatttgttaactacatcaattccaaactgccgggcattctggaactggaatatgaaggcttctacacccgtggctttttcgtgacgaagaaaaagtatgcgctgatcgatgaagaaggcaaaattgtcacccgtggtctggaaatcgtgcgtcgcgattggagtgaaattgccaaagaaacccaggcaaaagttctggaagcaatcctgaaacatggtaatgtcgaagaagcagtgaaaattgtcaaggaagtgacggaaaaactgtcgaagtatgaaatcccgccggaaaaactggtgatctacgaacaaattacccgcccgctgcatgaatataaagcgattggcccgcacgtggcagttgctaaacgtctggcagcccgcggtgtcaaagtgcgtccgggcatggtgatcggttatattgttctgcgtggcgatggtccgatcagtaaacgcgcgattctggccgaagaatttgatccgcgcaaacacaagtacgacgccgaatattacatcgaaaaccaggtgctgccggctgttctgcgtattctggaagcgttcggctatcgtaaagaagatctgcgctggcagaaaaccaagcaaacgggtctgaccgcatggctgaatgtgaaaaagaaataa

SEQ ID NO: 527 - DNA, 2328 bp, Artificial Sequence
  Synthetic
atgatcctggacgcaaactacattaccgaagatggcaaaccgattatccgcattttcaagaaggaaaacggcgaatttaaggtggaatatgaccgtaactttcgcccgtatatttacgctctgctgaaagatgacagccagatcgatgaagtgaaaaagattaccgcggaacgtcatggcaaaatcgttcgcattgttgatgtcgaaaaggtcaaaaagaaatttctgggtcgcccgattgaagtgtggaaactgtatttcgaacatccgcaagatgttccggctatccgtgacaaaattcgcgaacacccggcggtggttgatatctttgaatatgacattccgttcgcgaagcgttacctgatcgataaaggcctgattccgatggaaggtgacgaagaactgaaactgctggcctttgatattgaaacgctgtaccacgaaggcgaagaattcgcaaaaggtccgattatcatgatcagctatgcggacgaagaaggcgccaaagttattacctggaagaaagtcgatctgccgtatgtggaagtcgtgagctctgaacgtgaaatgatcaaacgctttctgaaagtgattcgcgaaaaagatccggacgttattatcacctataacggcgatagtttcgacctgccgtacctggtgaaacgtgccgaaaagctgggtattaaactgccgctgggtcgtgacggttccgaaccgaaaatgcagcgcctgggcgatatgacggcagttgaaatcaaaggtcgcattcattttgatctgtaccacgtgatccgtcgcaccattaatctgccgacctatacgctggaagcagtttacgaagctatcttcggcaagccgaaagaaaaggtctatgcccatgaaattgcagaagcttgggaaacgggcaagggtctggaacgtgtcgctaaatatagcatggaagatgcgaaggtgacctacgaactgggtcgtgaatttttcccgatggaagcacagctgagccgcctggtcggccaaccgctgtgggatgtgtctcgtagttccaccggtaacctggtggaatggtatctgctgcgtaaagcgtatgaacgcaacgaactggcgccgaataaaccgtcgggccgcgaatacgatgaacgtcgcgaaggttatgcgggcggttacgttaaagaaccggaacgtggtctgtgggaaaacatcgtgtacctggattacaaaagtctgtatccgtccattatcattacccataacgtgagcccggacacgctgaatcgcgaaggctgcaaagaatacgatgtcgccccgcaagtgggtcacaaattttgtaaagactttccgggcttcattccgtctctgctgggtgatctgctggaagaacgtcagaaaattaaaaagaaaatgaaagcaaccaaagatccgattgagaaaaaactgctggactatcgtcaacgcgcgatcaaaattctggccaacagttattacggctattacggttatgcgaaagcccgctggtactgcaaagaatgtgcagaatccgttacggcttggggccgtgaatatatcgaaaccacgatccgcgaaatcgaagaaaaatacggtttcaaagtgctgtacgccgataccgacggcttccatgcaacgatcccgggtgaagatgctgaagaaattaagaaaaaagcgaaagaattcctgaaatacatcaacagcaaactgccgggcgccctggaactggaatatgaaggcttctaccgtcgcggctttttcgtgaccaagaaaaaatacgcagttatcgacgaagaaggcaaaattaccacgcgtggtctggaaatcgtgcgtcgcgattggagtgaaattgccaaagaaacccaggcacgcgttctggaagcaatcctgcgtcatggtgacgtcgaagaagccgttcgcattgtcaaagatgtgacggaaaagctgtcgaaatatgaagtcccgccggaaaaactggtgatccatgaacaaattacccgtgaactgaaggattacaaagcgacgggcccgcacgttgcaattgctaaacgcctggcagcccgtggcatcaagattcgtccgggtaccgttatcagctatattgtcctgaaaggctctggtcgcatcggtgatcgtgctattccgtttgatgaattcgacccgacgaaacaccgttacgatgccgaatattacatcgaaaatcaggtgctgccggccgttgaacgcattctgaaagcatttggctataagaaagaagaactgcgctaccagaaaacccgtcaagtgggcctgggtgcgtggctgaagctgaaaggtaagaaataa

SEQ ID NO: 528 - DNA, 2322 bp, Artificial Sequence
  Synthetic
atgatcctggacgcaaactacattaccgaagatggcaaaccgattatccgcattttcaagaaggaaaacggcgaatttaaggtggaatatgaccgtaactttcgcccgtatatttacgctctgctgaaagatgacagccagatcgatgaagtgaaaaagattaccgcggaacgtcatggcaaaatcgttcgcattgttgatgtcgaaaaggtcaaaaagaaatttctgggtcgcccgattgaagtgtggaaactgtatttcgaacatccgcaagatgttccggctatccgtgacaaaattcgcgaacacccggcggtggttgatatctttgaatatgacattccgttcgcgaagcgttacctgatcgataaaggcctgattccgatggaaggtgacgaagaactgaaactgctggcctttgatattgaaacgctgtaccacgaaggcgaagaattcgcaaaaggtccgattatcatgatcagctatgcggacgaagaaggcgccaaagttattacctggaagaaagtcgatctgccgtatgtggaagtcgtgagctctgaacgtgaaatgatcaaacgctttctgaaagtgattcgcgaaaaagatccggacgttattatcacctataacggcgatagtttcgacctgccgtacctggtgaaacgtgccgaaaagctgggtattaaactgccgctgggtcgtgacggttccgaaccgaaaatgcagcgcctgggcgatatgacggcagttgaaatcaaaggtcgcattcattttgatctgtaccacgtgatccgtcgcaccattaatctgccgacctatacgctggaagcagtttacgaagctatcttcggcaagccgaaagaaaaggtctatgcccatgaaattgcagaagcttgggaaacgggcaagggtctggaacgtgtcgctaaatatagcatggaagatgcgaaggtgacctacgaactgggtcgtgaatttttcccgatggaagcacagctgagccgcctggtcggccaaccgctgtgggatgtgtctcgtagttccaccggtaacctggtggaatggtatctgctgcgtaaagcgtatgaacgcaacgaactggcgccgaataaaccgtcgggccgcgaatacgatgaacgtcgcgaaggttatgcgggcggttacgttaaagaaccggaacgtggtctgtgggaaaacatcgtgtacctggattacaaaagtctgtatccgtccattatcattacccataacgtgagcccggacacgctgaatcgcgaaggctgcaaagaatacgatgtcgccccgcaagtgggtcacaaattttgtaaagactttccgggcttcattccgtctctgctgggtgatctgctggaagaacgtcagaaaattaaaaagaaaatgaaagcaaccaaagatccgattgagaaaaaactgctggactatcgtcaacgcgcgatcaaaattctggccaacagttattacggctattacggttatgcgaaagcccgctggtactgcaaagaatgtgcagaatccgttacggcttggggccgtgaatatatcgaaaccacgatccgcgaaatcgaagaaaaatacggtttcaaagtgctgtacgccgataccgacggcttccatgcaacgatcccgggtgaagatgctgaagaaattaagaaaaaagcgaaagaattcctgaaatacatcaacagcaaactgccgggcgccctggaactggaatatgaaggcttctaccgtcgcggctttttcgtgaccaagaaaaaatacgcagttatcgacgaagaaggcaaaattaccacgcgtggtctggaaatcgtgcgtcgcgattggagtgaaattgccaaagaaacccaggcacgtgtcctggaagcaatcctgaaacatggtgatgtggaagaagcggttcgcattgtcaaagaagtgacggaaaagctgtcgaaatatgaagttccgccggaaaaactggtcatccatgaacaaattacccgcgatctgcgtgactacaaagccacgggtccgcacgtggcagttgcaaaacgtctggcagcccgtggcgtgaagattcgtccgggtaccgtgatcagttatattgttctgaaaggctccggtcgcatcggtgaccgtgctattccgtttgatgaattcgacccgacgaaacaccgttacgatgccgaatattacatcgaaaatcaggtcctgccggccgtggaacgcattctgaaagcatttggttatcgcaaggaagatctgcgttaccagaagaccaaacaagtcggcctgggtgcgtggctgaaagtgaaaaagtaa

SEQ ID NO: 529 - DNA, 2328 bp, Artificial Sequence
  Synthetic
atgatcctggacgcaaactacattaccgaagatggcaaaccgattatccgcattttcaagaaggaaaacggcgaatttaaggtggaatatgaccgtaactttcgcccgtatatttacgctctgctgaaagatgacagccagatcgatgaagtgaaaaagattaccgcggaacgtcatggcaaaatcgttcgcattgttgatgtcgaaaaggtcaaaaagaaatttctgggtcgcccgattgaagtgtggaaactgtatttcgaacatccgcaagatgttccggctatccgtgacaaaattcgcgaacacccggcggtggttgatatctttgaatatgacattccgttcgcgaagcgttacctgatcgataaaggcctgattccgatggaaggtgacgaagaactgaaactgctggcctttgatattgaaacgctgtaccacgaaggcgaagaattcgcaaaaggtccgattatcatgatcagctatgcggacgaagaaggcgccaaagttattacctggaagaaagtcgatctgccgtatgtggaagtcgtgagctctgaacgtgaaatgatcaaacgctttctgaaagtgattcgcgaaaaagatccggacgttattatcacctataacggcgatagtttcgacctgccgtacctggtgaaacgtgccgaaaagctgggtattaaactgccgctgggtcgtgacggttccgaaccgaaaatgcagcgcctgggcgatatgacggcagttgaaatcaaaggtcgcattcattttgatctgtaccacgtgatccgtcgcaccattaatctgccgacctatacgctggaagcagtttacgaagctatcttcggcaagccgaaagaaaaggtctatgcccatgaaattgcagaagcttgggaaacgggcaagggtctggaacgtgtcgctaaatatagcatggaagatgcgaaggtgacctacgaactgggtcgtgaatttttcccgatggaagcacagctgagccgcctggtcggccaaccgctgtgggatgtgtctcgtagttccaccggtaacctggtggaatggtatctgctgcgtaaagcgtatgaacgcaacgaactggcgccgaataaaccgtcgggccgcgaatacgatgaacgtcgcgaaggttatgcgggcggttacgttaaagaaccggaacgtggtctgtgggaaaacatcgtgtacctggattacaaaagtctgtatccgtccattatcattacccataacgtgagcccggacacgctgaatcgcgaaggctgcaaagaatacgatgtcgccccgcaagtgggtcacaaattttgtaaagactttccgggcttcattccgtctctgctgggtgatctgctggaagaacgtcagaaaattaaaaagaaaatgaaagcaaccaaagatccgattgagaaaaaactgctggactatcgtcaacgcgcgatcaaaattctggccaacagttattacggctattacggttatgcgaaagcccgctggtactgcaaagaatgtgcagaatccgttacggcttggggccgtgaatatatcgaaaccacgatccgcgaaatcgaagaaaaatacggtttcaaagtgctgtacgccgataccgacggcttccatgcaacgatcccgggtgaagatgctgaagaaattaagaaaaaagcgaaagaattcctgaaatacatcaacagcaaactgccgggcgccctggaactggaatatgaaggcttctaccgtcgcggctttttcgtgaccaagaaaaaatacgcagttatcgacgaagaaggcaaaattaccacgcgtggtctggaaatcgtgcgtcgcgattggagtgaaattgccaaagaaacccaggcacgtgtgctggaagctctgctgaaagatggcaatgttgaagaagcggtttccattgtcaaagaagtgacggaaaagctgggtaaatatgaagtcccgccggaaaaactggtgatccatgaacaaattacccgcgaactgaaggattacaaagcgacgggcccgcacgttgctatcgcgaaacgtctggcagcgcgtggcgtgaagattcgtccgggtaccgttatcagctatattgtcctgaaaggctctggtcgtatcggtgaccgcgcgattccgtttgatgaattcgacccgacgaaacatcgctacgatgcagaatattacatcgaaaaccaggttctgccggctgtcgaacgtattctgaaagcgtttggctatcgtgccgaagatctgcgctaccagaaaacccgtcaagtgggcctgggtgtttggctgcaaccgaaaggtaagaaataa

SEQ ID NO: 530 - DNA, 2325 bp, Artificial Sequence
  Synthetic
atgatcctggacgcaaactacattaccgaagatggcaaaccgattatccgcattttcaagaaggaaaacggcgaatttaaggtggaatatgaccgtaactttcgcccgtatatttacgctctgctgaaagatgacagccagatcgatgaagtgaaaaagattaccgcggaacgtcatggcaaaatcgttcgcattgttgatgtcgaaaaggtcaaaaagaaatttctgggtcgcccgattgaagtgtggaaactgtatttcgaacatccgcaagatgttccggctatccgtgacaaaattcgcgaacacccggcggtggttgatatctttgaatatgacattccgttcgcgaagcgttacctgatcgataaaggcctgattccgatggaaggtgacgaagaactgaaactgctggcctttgatattgaaacgctgtaccacgaaggcgaagaattcgcaaaaggtccgattatcatgatcagctatgcggacgaagaaggcgccaaagttattacctggaagaaagtcgatctgccgtatgtggaagtcgtgagctctgaacgtgaaatgatcaaacgctttctgaaagtgattcgcgaaaaagatccggacgttattatcacctataacggcgatagtttcgacctgccgtacctggtgaaacgtgccgaaaagctgggtattaaactgccgctgggtcgtgacggttccgaaccgaaaatgcagcgcctgggcgatatgacggcagttgaaatcaaaggtcgcattcattttgatctgtaccacgtgatccgtcgcaccattaatctgccgacctatacgctggaagcagtttacgaagctatcttcggcaagccgaaagaaaaggtctatgcccatgaaattgcagaagcttgggaaacgggcaagggtctggaacgtgtcgctaaatatagcatggaagatgcgaaggtgacctacgaactgggtcgtgaatttttcccgatggaagcacagctgagccgcctggtcggccaaccgctgtgggatgtgtctcgtagttccaccggtaacctggtggaatggtatctgctgcgtaaagcgtatgaacgcaacgaactggcgccgaataaaccgtcgggccgcgaatacgatgaacgtcgcgaaggttatgcgggcggttacgttaaagaaccggaacgtggtctgtgggaaaacatcgtgtacctggattacaaaagtctgtatccgtccattatcattacccataacgtgagcccggacacgctgaatcgcgaaggctgcaaagaatacgatgtcgccccgcaagtgggtcacaaattttgtaaagactttccgggcttcattccgtctctgctgggtgatctgctggaagaacgtcagaaaattaaaaagaaaatgaaagcaaccaaagatccgattgagaaaaaactgctggactatcgtcaacgcgcgatcaaaattctggccaacagttattacggctattacggttatgcgaaagcccgctggtactgcaaagaatgtgcagaatccgttacggcttggggccgtgaatatatcgaaaccacgatccgcgaaatcgaagaaaaatacggtttcaaagtgctgtacgccgataccgacggcttccatgcaacgatcccgggtgaagatgctgaagaaattaagaaaaaagcgaaagaattcctgaaatacatcaacagcaaactgccgggcgccctggaactggaatatgaaggcttctaccgtcgcggctttttcgtgaccaagaaaaaatacgcagttatcgacgaagaaggcaaaattaccacgcgtggtctggaaatcgtgcgtcgcgattggagtgaaattgccaaagaaacccaggcaaaggttctggaagcaattctgaaacatggtaacgtcgaagaagcggtcaagatcgtgaaagaagttaccgaaaaactgtcgaattatgaaattccggtcgaaaagctggtgatctacgaacaaattacgcgcccgctgaacgaatataaagccattggcccgcacgtggcagttgctaaacgtctggcggccaagggtatcaagattaaaccgggcatggtgattggttatgttgtcctgcgcggcgatggtccgatcagcaaacgtgcgatcgccatcgaagaattcgatggcaaaaagcataagtacgacgcagaatactacatcgaaaatcaggttctgccggccgtcgaacgtatcctgaaagcattcggttataagcgtgaagatctgcgctggcagaagaccaaacaagtgggcctgggtgcgtggctgaaagttaaaaagtcttaa

SEQ ID NO: 531 - DNA, 2328 bp, Artificial Sequence
  Synthetic
atgatcctggacgcaaactacattaccgaagatggcaaaccgattatccgcattttcaagaaggaaaacggcgaatttaaggtggaatatgaccgtaactttcgcccgtatatttacgctctgctgaaagatgacagccagatcgatgaagtgaaaaagattaccgcggaacgtcatggcaaaatcgttcgcattgttgatgtcgaaaaggtcaaaaagaaatttctgggtcgcccgattgaagtgtggaaactgtatttcgaacatccgcaagatgttccggctatccgtgacaaaattcgcgaacacccggcggtggttgatatctttgaatatgacattccgttcgcgaagcgttacctgatcgataaaggcctgattccgatggaaggtgacgaagaactgaaactgctggcctttgatattgaaacgctgtaccacgaaggcgaagaattcgcaaaaggtccgattatcatgatcagctatgcggacgaagaaggcgccaaagttattacctggaagaaagtcgatctgccgtatgtggaagtcgtgagctctgaacgtgaaatgatcaaacgctttctgaaagtgattcgcgaaaaagatccggacgttattatcacctataacggcgatagtttcgacctgccgtacctggtgaaacgtgccgaaaagctgggtattaaactgccgctgggtcgtgacggttccgaaccgaaaatgcagcgcctgggcgatatgacggcagttgaaatcaaaggtcgcattcattttgatctgtaccacgtgatccgtcgcaccattaatctgccgacctatacgctggaagcagtttacgaagctatcttcggcaagccgaaagaaaaggtctatgcccatgaaattgcagaagcttgggaaacgggcaagggtctggaacgtgtcgctaaatatagcatggaagatgcgaaggtgacctacgaactgggtcgtgaatttttcccgatggaagcacagctgagccgcctggtcggccaaccgctgtgggatgtgtctcgtagttccaccggtaacctggtggaatggtatctgctgcgtaaagcgtatgaacgcaacgaactggcgccgaataaaccgtcgggccgcgaatacgatgaacgtcgcgaaggttatgcgggcggttacgttaaagaaccggaacgtggtctgtgggaaaacatcgtgtacctggattacaaaagtctgtatccgtccattatcattacccataacgtgagcccggacacgctgaatcgcgaaggctgcaaagaatacgatgtcgccccgcaagtgggtcacaaattttgtaaagactttccgggcttcattccgtctctgctgggtgatctgctggaagaacgtcagaaaattaaaaagaaaatgaaagcaaccaaagatccgattgagaaaaaactgctggactatcgtcaacgcgcgatcaaaattctggccaacagttattacggctattacggttatgcgaaagcccgctggtactgcaaagaatgtgcagaatccgttacggcttggggccgtgaatatatcgaaaccacgatccgcgaaatcgaagaaaaatacggtttcaaagtgctgtacgccgataccgacggcttccatgcaacgatcccgggtgaagatgctgaagaaattaagaaaaaagcgaaagaattcctgaaatacatcaacagcaaactgccgggcgccctggaactggaatatgaaggcttctaccgtcgcggctttttcgtgaccaagaaaaaatacgcagttatcgacgaagaaggcaaaattaccacgcgtggtctggaaatcgtgcgtcgcgattggagtgaaattgccaaagaaacccaggcacgtgttctggaagcactgctgaaagatggtaatgtcgaagaagcagtgagtattgttaaagaagtcacggaaaaactgtccaagtatgaagtcccgccggaaaaactggtgattcatgaacaaatcacccgcgaactgaaagattacaaggcgacgggcccgcacgtggcaattgctaaacgtctggcagcgcgtggcgttaagatccgtccgggtaccgttattagctatatcgtcctgaaaggctctggtcgtattggtgaccgcgccatcccgtttgatgaattcgacccggctaaacaccgctacgatgcggaatattacattgaaaatcaggtcctgccggctgtggaacgtatcctgaaagcgtttggctatcgtaaggaagatctgcgctaccagaaaacccgtcaagtgggcctgggtgcgtggctgaaaccgaagggtaaaaagtaa

SEQ ID NO: 532 - DNA, 2328 bp, Artificial Sequence
  Synthetic
atgatcctggacgcaaactacattaccgaagatggcaaaccgattatccgcattttcaagaaggaaaacggcgaatttaaggtggaatatgaccgtaactttcgcccgtatatttacgctctgctgaaagatgacagccagatcgatgaagtgaaaaagattaccgcggaacgtcatggcaaaatcgttcgcattgttgatgtcgaaaaggtcaaaaagaaatttctgggtcgcccgattgaagtgtggaaactgtatttcgaacatccgcaagatgttccggctatccgtgacaaaattcgcgaacacccggcggtggttgatatctttgaatatgacattccgttcgcgaagcgttacctgatcgataaaggcctgattccgatggaaggtgacgaagaactgaaactgctggcctttgatattgaaacgctgtaccacgaaggcgaagaattcgcaaaaggtccgattatcatgatcagctatgcggacgaagaaggcgccaaagttattacctggaagaaagtcgatctgccgtatgtggaagtcgtgagctctgaacgtgaaatgatcaaacgctttctgaaagtgattcgcgaaaaagatccggacgttattatcacctataacggcgatagtttcgacctgccgtacctggtgaaacgtgccgaaaagctgggtattaaactgccgctgggtcgtgacggttccgaaccgaaaatgcagcgcctgggcgatatgacggcagttgaaatcaaaggtcgcattcattttgatctgtaccacgtgatccgtcgcaccattaatctgccgacctatacgctggaagcagtttacgaagctatcttcggcaagccgaaagaaaaggtctatgcccatgaaattgcagaagcttgggaaacgggcaagggtctggaacgtgtcgctaaatatagcatggaagatgcgaaggtgacctacgaactgggtcgtgaatttttcccgatggaagcacagctgagccgcctggtcggccaaccgctgtgggatgtgtctcgtagttccaccggtaacctggtggaatggtatctgctgcgtaaagcgtatgaacgcaacgaactggcgccgaataaaccgtcgggccgcgaatacgatgaacgtcgcgaaggttatgcgggcggttacgttaaagaaccggaacgtggtctgtgggaaaacatcgtgtacctggattacaaaagtctgtatccgtccattatcattacccataacgtgagcccggacacgctgaatcgcgaaggctgcaaagaatacgatgtcgccccgcaagtgggtcacaaattttgtaaagactttccgggcttcattccgtctctgctgggtgatctgctggaagaacgtcagaaaattaaaaagaaaatgaaagcaaccaaagatccgattgagaaaaaactgctggactatcgtcaacgcgcgatcaaaattctggccaacagttattacggctattacggttatgcgaaagcccgctggtactgcaaagaatgtgcagaatccgttacggcttggggccgtgaatatatcgaaaccacgatccgcgaaatcgaagaaaaatacggtttcaaagtgctgtacgccgataccgacggcttccatgcaacgatcccgggtgaagatgctgaagaaattaagaaaaaagcgaaagaattcctgaaatacatcaacagcaaactgccgggcgccctggaactggaatatgaaggcttctaccgtcgcggctttttcgtgaccaagaaaaaatacgcagttatcgacgaagaaggcaaaattaccacgcgtggtctggaaatcgtgcgtcgcgattggagtgaaattgccaaagaaacccaggcacgcgtcctggaagcaatcctgaaagatggtgacgtggaagaagccgtccgtattgtgaaagaagttacggaaaaactgtccaaatatgaagttccgccggaaaaactggtcatccatgaacaaattacccgcgaactgaaagattacaaagcgacgggcccgcacgtcgcaatcgctaaacgtctggcggcgcgtggcgtgaaaattcgtccgggtaccgtgatctcatatattgttctgaaaggctcgggtcgtatcggtgaccgcgctattccgtttgatgaattcgacccgaaaaaacacaaatacgatgcggaatactacatcgaaaaccaggttctgccggccgtcgaacgtattctgcgcgcatttggctaccgtaaagaagatctgcgttatcaaaaaaccaaacaagtgggtctgggtgcgtggctgaaaccgaaaggtaaaaaataa

SEQ ID NO: 533 - DNA, 2325 bp, Artificial Sequence
  Synthetic
atgatcctggacgcaaactacattaccgaagatggcaaaccgattatccgcattttcaagaaggaaaacggcgaatttaaggtggaatatgaccgtaactttcgcccgtatatttacgctctgctgaaagatgacagccagatcgatgaagtgaaaaagattaccgcggaacgtcatggcaaaatcgttcgcattgttgatgtcgaaaaggtcaaaaagaaatttctgggtcgcccgattgaagtgtggaaactgtatttcgaacatccgcaagatgttccggctatccgtgacaaaattcgcgaacacccggcggtggttgatatctttgaatatgacattccgttcgcgaagcgttacctgatcgataaaggcctgattccgatggaaggtgacgaagaactgaaactgctggcctttgatattgaaacgctgtaccacgaaggcgaagaattcgcaaaaggtccgattatcatgatcagctatgcggacgaagaaggcgccaaagttattacctggaagaaagtcgatctgccgtatgtggaagtcgtgagctctgaacgtgaaatgatcaaacgctttctgaaagtgattcgcgaaaaagatccggacgttattatcacctataacggcgatagtttcgacctgccgtacctggtgaaacgtgccgaaaagctgggtattaaactgccgctgggtcgtgacggttccgaaccgaaaatgcagcgcctgggcgatatgacggcagttgaaatcaaaggtcgcattcattttgatctgtaccacgtgatccgtcgcaccattaatctgccgacctatacgctggaagcagtttacgaagctatcttcggcaagccgaaagaaaaggtctatgcccatgaaattgcagaagcttgggaaacgggcaagggtctggaacgtgtcgctaaatatagcatggaagatgcgaaggtgacctacgaactgggtcgtgaatttttcccgatggaagcacagctgagccgcctggtcggccaaccgctgtgggatgtgtctcgtagttccaccggtaacctggtggaatggtatctgctgcgtaaagcgtatgaacgcaacgaactggcgccgaataaaccgtcgggccgcgaatacgatgaacgtcgcgaaggttatgcgggcggttacgttaaagaaccggaacgtggtctgtgggaaaacatcgtgtacctggattacaaaagtctgtatccgtccattatcattacccataacgtgagcccggacacgctgaatcgcgaaggctgcaaagaatacgatgtcgccccgcaagtgggtcacaaattttgtaaagactttccgggcttcattccgtctctgctgggtgatctgctggaagaacgtcagaaaattaaaaagaaaatgaaagcaaccaaagatccgattgagaaaaaactgctggactatcgtcaacgcgcgatcaaaattctggccaacagttattacggctattacggttatgcgaaagcccgctggtactgcaaagaatgtgcagaatccgttacggcttggggccgtgaatatatcgaaaccacgatccgcgaaatcgaagaaaaatacggtttcaaagtgctgtacgccgataccgacggcttccatgcaacgatcccgggtgaagatgctgaagaaattaagaaaaaagcgaaagaattcctgaaatacatcaacagcaaactgccgggcgccctggaactggaatatgaaggcttctaccgtcgcggctttttcgtgaccaagaaaaaatacgcagttatcgacgaagaaggcaaaattaccacgcgtggtctggaaatcgtgcgtcgcgattggagtgaaattgccaaagaaacccaggcacgtgttctggaagcaattctgaaacatggtaacgtcgaagaagcggtcaaaatcgtgaaagaagttacggaaaaactgtctaactacgaaattccgccggaaaaactggccatctacgaacaaattacccgcccgctgcatgaatataaagcaatcggtccgcacgtcgcagtggcaaaacgtctggcagcacgcggcgttaaagtcaaaccgggtatggtcatcggctatattgtgctgcgtggtgatggcccgatcagcaaccgcgcaattctggctgaagaatacgatctgaaaaaacacaaatacgacgccgaatattacatcgaaaatcaggttctgccggctgtcctgcgtattctggaagcgtttggctatcgtaaagaagatctgcgctggcagaaaacccgtcaaacgggtctgacctcatggctgaatattaaaaaatcgtaa

SEQ ID NO: 534 - DNA, 2325 bp, Artificial Sequence
  Synthetic
atgatcctggacgcaaactacattaccgaagatggcaaaccgattatccgcattttcaagaaggaaaacggcgaatttaaggtggaatatgaccgtaactttcgcccgtatatttacgctctgctgaaagatgacagccagatcgatgaagtgaaaaagattaccgcggaacgtcatggcaaaatcgttcgcattgttgatgtcgaaaaggtcaaaaagaaatttctgggtcgcccgattgaagtgtggaaactgtatttcgaacatccgcaagatgttccggctatccgtgacaaaattcgcgaacacccggcggtggttgatatctttgaatatgacattccgttcgcgaagcgttacctgatcgataaaggcctgattccgatggaaggtgacgaagaactgaaactgctggcctttgatattgaaacgctgtaccacgaaggcgaagaattcgcaaaaggtccgattatcatgatcagctatgcggacgaagaaggcgccaaagttattacctggaagaaagtcgatctgccgtatgtggaagtcgtgagctctgaacgtgaaatgatcaaacgctttctgaaagtgattcgcgaaaaagatccggacgttattatcacctataacggcgatagtttcgacctgccgtacctggtgaaacgtgccgaaaagctgggtattaaactgccgctgggtcgtgacggttccgaaccgaaaatgcagcgcctgggcgatatgacggcagttgaaatcaaaggtcgcattcattttgatctgtaccacgtgatccgtcgcaccattaatctgccgacctatacgctggaagcagtttacgaagctatcttcggcaagccgaaagaaaaggtctatgcccatgaaattgcagaagcttgggaaacgggcaagggtctggaacgtgtcgctaaatatagcatggaagatgcgaaggtgacctacgaactgggtcgtgaatttttcccgatggaagcacagctgagccgcctggtcggccaaccgctgtgggatgtgtctcgtagttccaccggtaacctggtggaatggtatctgctgcgtaaagcgtatgaacgcaacgaactggcgccgaataaaccgtcgggccgcgaatacgatgaacgtcgcgaaggttatgcgggcggttacgttaaagaaccggaacgtggtctgtgggaaaacatcgtgtacctggattacaaaagtctgtatccgtccattatcattacccataacgtgagcccggacacgctgaatcgcgaaggctgcaaagaatacgatgtcgccccgcaagtgggtcacaaattttgtaaagactttccgggcttcattccgtctctgctgggtgatctgctggaagaacgtcagaaaattaaaaagaaaatgaaagcaaccaaagatccgattgagaaaaaactgctggactatcgtcaacgcgcgatcaaaattctggccaacagttattacggctattacggttatgcgaaagcccgctggtactgcaaagaatgtgcagaatccgttacggcttggggccgtgaatatatcgaaaccacgatccgcgaaatcgaagaaaaatacggtttcaaagtgctgtacgccgataccgacggcttccatgcaacgatcccgggtgaagatgctgaagaaattaagaaaaaagcgaaagaattcctgaaatacatcaacagcaaactgccgggcgccctggaactggaatatgaaggcttctaccgtcgcggctttttcgtgaccaagaaaaaatacgcagttatcgacgaagaaggcaaaattaccacgcgtggtctggaaatcgtgcgtcgcgattggagtgaaattgccaaagaaacccaggcaaaagttctggaagcaatcctgaaacatggtaatgtcgaagaagcagtgaaaattgtcaaggaagtgacggaaaaactgtcgaagtatgaaatcccgccggaaaaactggtgatctacgaacaaattacccgcccgctgcatgaatataaagcgattggcccgcacgtggcagttgctaaacgtctggcagcccgcggtgtcaaagtgcgtccgggcatggtgatcggttatattgttctgcgtggcgatggtccgatcagtaaacgcgcgattctggccgaagaatttgatccgcgcaaacacaagtacgacgccgaatattacatcgaaaaccaggtgctgccggctgttctgcgtattctggaagcgttcggctatcgtaaagaagatctgcgctggcagaaaaccaagcaaacgggtctgaccgcatggctgaatgtgaaaaagaaataa

SEQ ID NO: 535 - DNA, 2331 bp, Artificial Sequence
  Synthetic
atgatcctggacgcaaactacattaccgaagatggcaaaccgattatccgcattttcaagaaggaaaacggcgaatttaaggtggaatatgaccgtaactttcgcccgtatatttacgctctgctgaaagatgacagccagatcgatgaagtgaaaaagattaccgcggaacgtcatggcaaaatcgttcgcattgttgatgtcgaaaaggtcaaaaagaaatttctgggtcgcccgattgaagtgtggaaactgtatttcgaacatccgcaagatgttccggctatccgtgacaaaattcgcgaacacccggcggtggttgatatctttgaatatgacattccgttcgcgaagcgttacctgatcgataaaggcctgattccgatggaaggtgacgaagaactgaaactgctggcctttgatattgaaacgctgtaccacgaaggcgaagaattcgcaaaaggtccgattatcatgatcagctatgcggacgaagaaggcgccaaagttattacctggaagaaagtcgatctgccgtatgtggaagtcgtgagctctgaacgtgaaatgatcaaacgctttctgaaagtgattcgcgaaaaagatccggacgttattatcacctataacggcgatagtttcgacctgccgtacctggtgaaacgtgccgaaaagctgggtattaaactgccgctgggtcgtgacggttccgaaccgaaaatgcagcgcctgggcgatatgacggcagttgaaatcaaaggtcgcattcattttgatctgtaccacgtgatccgtcgcaccattaatctgccgacctatacgctggaagcagtttacgaagctatcttcggcaagccgaaagaaaaggtctatgcccatgaaattgcagaagcttgggaaacgggcaagggtctggaacgtgtcgctaaatatagcatggaagatgcgaaggtgacctacgaactgggtcgtgaatttttcccgatggaagcacagctgagccgcctggtcggccaaccgctgtgggatgtgtctcgtagttccaccggtaacctggtggaatggtatctgctgcgtaaagcgtatgaacgcaacgaactggcaccgaataaaccggatgaacgtgaatatgaacgtcgcctgcgcgaatcttatgccggcggttacgttaaggaaccggaaaaaggcctgtgggaaggtctggtgtctctggattttcgctcactgtacccgtcgattatcattacgcataacgtgtccccggacaccctgaatcgtgaaggctgcatggaatatgatgttgctccggaagtcaaacacaagttttgtaaagactttccgggtttcattccgtcactgctgaaacgtctgctggatgaacgccaggaaatcaaacgtcgcatgaaagcctcgaaggatccgattgaaaagaaaatgctggactatcgtcaacgcgcaatcaaaattctggctaatagctattacggctattacggttatgcgaaggcccgctggtactgcaaagaatgtgcggaatctgtcacggcctggggccgtgaatatatcgaatttgtgcgcaaagaactggaagaaaagttcggtttcaaggttctgtacattgatacggacggcctgtacgcaaccatcccgggtgctaaaccggaagaaattaagcgtaaggccctggaatttgtggaatacatcaacgcaaaactgccgggcctgctggaactggaatatgaaggcttctacgttcgcggctttttcgtcacgaagaaaaagtatgcgctgattgacgaagaaggcaaaatcattacccgtggtctggaaatcgttcgtcgcgattggagtgaaattgccaaagaaacccaggcacgcgttctggaagcaatcctgcgtcatggtgacgtcgaagaagccgttcgcattgtcaaagatgtgacggaaaagctgtcgaaatatgaagtcccgccggaaaaactggtgatccatgaacaaattacccgtgaactgaaggattacaaagcgacgggcccgcacgttgcaattgctaaacgcctggcagcccgtggcatcaagattcgtccgggtaccgttatcagctatattgtcctgaaaggctctggtcgcatcggtgatcgtgctattccgtttgatgaattcgacccgacgaaacaccgttacgatgccgaatattacatcgaaaatcaggtgctgccggccgttgaacgcattctgaaagcatttggctataagaaagaagaactgcgctaccagaaaacccgtcaagtgggcctgggtgcgtggctgaagctgaaaggtaagaaataa

SEQ ID NO: 536 - DNA, 2325 bp, Artificial Sequence
  Synthetic
atgatcctggacgcaaactacattaccgaagatggcaaaccgattatccgcattttcaagaaggaaaacggcgaatttaaggtggaatatgaccgtaactttcgcccgtatatttacgctctgctgaaagatgacagccagatcgatgaagtgaaaaagattaccgcggaacgtcatggcaaaatcgttcgcattgttgatgtcgaaaaggtcaaaaagaaatttctgggtcgcccgattgaagtgtggaaactgtatttcgaacatccgcaagatgttccggctatccgtgacaaaattcgcgaacacccggcggtggttgatatctttgaatatgacattccgttcgcgaagcgttacctgatcgataaaggcctgattccgatggaaggtgacgaagaactgaaactgctggcctttgatattgaaacgctgtaccacgaaggcgaagaattcgcaaaaggtccgattatcatgatcagctatgcggacgaagaaggcgccaaagttattacctggaagaaagtcgatctgccgtatgtggaagtcgtgagctctgaacgtgaaatgatcaaacgctttctgaaagtgattcgcgaaaaagatccggacgttattatcacctataacggcgatagtttcgacctgccgtacctggtgaaacgtgccgaaaagctgggtattaaactgccgctgggtcgtgacggttccgaaccgaaaatgcagcgcctgggcgatatgacggcagttgaaatcaaaggtcgcattcattttgatctgtaccacgtgatccgtcgcaccattaatctgccgacctatacgctggaagcagtttacgaagctatcttcggcaagccgaaagaaaaggtctatgcccatgaaattgcagaagcttgggaaacgggcaagggtctggaacgtgtcgctaaatatagcatggaagatgcgaaggtgacctacgaactgggtcgtgaatttttcccgatggaagcacagctgagccgcctggtcggccaaccgctgtgggatgtgtctcgtagttccaccggtaacctggtggaatggtatctgctgcgtaaagcgtatgaacgcaacgaactggcaccgaataaaccggatgaacgtgaatatgaacgtcgcctgcgcgaatcttatgccggcggttacgttaaggaaccggaaaaaggcctgtgggaaggtctggtgtctctggattttcgctcactgtacccgtcgattatcattacgcataacgtgtccccggacaccctgaatcgtgaaggctgcatggaatatgatgttgctccggaagtcaaacacaagttttgtaaagactttccgggtttcattccgtcactgctgaaacgtctgctggatgaacgccaggaaatcaaacgtcgcatgaaagcctcgaaggatccgattgaaaagaaaatgctggactatcgtcaacgcgcaatcaaaattctggctaatagctattacggctattacggttatgcgaaggcccgctggtactgcaaagaatgtgcggaatctgtcacggcctggggccgtgaatatatcgaatttgtgcgcaaagaactggaagaaaagttcggtttcaaggttctgtacattgatacggacggcctgtacgcaaccatcccgggtgctaaaccggaagaaattaagcgtaaggccctggaatttgtggaatacatcaacgcaaaactgccgggcctgctggaactggaatatgaaggcttctacgttcgcggctttttcgtcacgaagaaaaagtatgcgctgattgacgaagaaggcaaaatcattacccgtggtctggaaatcgttcgtcgcgattggagtgaaattgccaaagaaacccaggcacgtgtcctggaagcaatcctgaaacatggtgatgtggaagaagcggttcgcattgtcaaagaagtgacggaaaagctgtcgaaatatgaagttccgccggaaaaactggtcatccatgaacaaattacccgcgatctgcgtgactacaaagccacgggtccgcacgtggcagttgcaaaacgtctggcagcccgtggcgtgaagattcgtccgggtaccgtgatcagttatattgttctgaaaggctccggtcgcatcggtgaccgtgctattccgtttgatgaattcgacccgacgaaacaccgttacgatgccgaatattacatcgaaaatcaggtcctgccggccgtggaacgcattctgaaagcatttggttatcgcaaggaagatctgcgttaccagaagaccaaacaagtcggcctgggtgcgtggctgaaagtgaaaaagtaa

SEQ ID NO: 537 - DNA, 2331 bp, Artificial Sequence
  Synthetic
atgatcctggacgcaaactacattaccgaagatggcaaaccgattatccgcattttcaagaaggaaaacggcgaatttaaggtggaatatgaccgtaactttcgcccgtatatttacgctctgctgaaagatgacagccagatcgatgaagtgaaaaagattaccgcggaacgtcatggcaaaatcgttcgcattgttgatgtcgaaaaggtcaaaaagaaatttctgggtcgcccgattgaagtgtggaaactgtatttcgaacatccgcaagatgttccggctatccgtgacaaaattcgcgaacacccggcggtggttgatatctttgaatatgacattccgttcgcgaagcgttacctgatcgataaaggcctgattccgatggaaggtgacgaagaactgaaactgctggcctttgatattgaaacgctgtaccacgaaggcgaagaattcgcaaaaggtccgattatcatgatcagctatgcggacgaagaaggcgccaaagttattacctggaagaaagtcgatctgccgtatgtggaagtcgtgagctctgaacgtgaaatgatcaaacgctttctgaaagtgattcgcgaaaaagatccggacgttattatcacctataacggcgatagtttcgacctgccgtacctggtgaaacgtgccgaaaagctgggtattaaactgccgctgggtcgtgacggttccgaaccgaaaatgcagcgcctgggcgatatgacggcagttgaaatcaaaggtcgcattcattttgatctgtaccacgtgatccgtcgcaccattaatctgccgacctatacgctggaagcagtttacgaagctatcttcggcaagccgaaagaaaaggtctatgcccatgaaattgcagaagcttgggaaacgggcaagggtctggaacgtgtcgctaaatatagcatggaagatgcgaaggtgacctacgaactgggtcgtgaatttttcccgatggaagcacagctgagccgcctggtcggccaaccgctgtgggatgtgtctcgtagttccaccggtaacctggtggaatggtatctgctgcgtaaagcgtatgaacgcaacgaactggcaccgaataaaccggatgaacgtgaatatgaacgtcgcctgcgcgaatcttatgccggcggttacgttaaggaaccggaaaaaggcctgtgggaaggtctggtgtctctggattttcgctcactgtacccgtcgattatcattacgcataacgtgtccccggacaccctgaatcgtgaaggctgcatggaatatgatgttgctccggaagtcaaacacaagttttgtaaagactttccgggtttcattccgtcactgctgaaacgtctgctggatgaacgccaggaaatcaaacgtcgcatgaaagcctcgaaggatccgattgaaaagaaaatgctggactatcgtcaacgcgcaatcaaaattctggctaatagctattacggctattacggttatgcgaaggcccgctggtactgcaaagaatgtgcggaatctgtcacggcctggggccgtgaatatatcgaatttgtgcgcaaagaactggaagaaaagttcggtttcaaggttctgtacattgatacggacggcctgtacgcaaccatcccgggtgctaaaccggaagaaattaagcgtaaggccctggaatttgtggaatacatcaacgcaaaactgccgggcctgctggaactggaatatgaaggcttctacgttcgcggctttttcgtcacgaagaaaaagtatgcgctgattgacgaagaaggcaaaatcattacccgtggtctggaaatcgttcgtcgcgattggagtgaaattgccaaagaaacccaggcacgtgtgctggaagctctgctgaaagatggcaatgttgaagaagcggtttccattgtcaaagaagtgacggaaaagctgggtaaatatgaagtcccgccggaaaaactggtgatccatgaacaaattacccgcgaactgaaggattacaaagcgacgggcccgcacgttgctatcgcgaaacgtctggcagcgcgtggcgtgaagattcgtccgggtaccgttatcagctatattgtcctgaaaggctctggtcgtatcggtgaccgcgcgattccgtttgatgaattcgacccgacgaaacatcgctacgatgcagaatattacatcgaaaaccaggttctgccggctgtcgaacgtattctgaaagcgtttggctatcgtgccgaagatctgcgctaccagaaaacccgtcaagtgggcctgggtgtttggctgcaaccgaaaggtaagaaataa

SEQ ID NO: 538 - DNA, 2328 bp, Artificial Sequence
  Synthetic
atgatcctggacgcaaactacattaccgaagatggcaaaccgattatccgcattttcaagaaggaaaacggcgaatttaaggtggaatatgaccgtaactttcgcccgtatatttacgctctgctgaaagatgacagccagatcgatgaagtgaaaaagattaccgcggaacgtcatggcaaaatcgttcgcattgttgatgtcgaaaaggtcaaaaagaaatttctgggtcgcccgattgaagtgtggaaactgtatttcgaacatccgcaagatgttccggctatccgtgacaaaattcgcgaacacccggcggtggttgatatctttgaatatgacattccgttcgcgaagcgttacctgatcgataaaggcctgattccgatggaaggtgacgaagaactgaaactgctggcctttgatattgaaacgctgtaccacgaaggcgaagaattcgcaaaaggtccgattatcatgatcagctatgcggacgaagaaggcgccaaagttattacctggaagaaagtcgatctgccgtatgtggaagtcgtgagctctgaacgtgaaatgatcaaacgctttctgaaagtgattcgcgaaaaagatccggacgttattatcacctataacggcgatagtttcgacctgccgtacctggtgaaacgtgccgaaaagctgggtattaaactgccgctgggtcgtgacggttccgaaccgaaaatgcagcgcctgggcgatatgacggcagttgaaatcaaaggtcgcattcattttgatctgtaccacgtgatccgtcgcaccattaatctgccgacctatacgctggaagcagtttacgaagctatcttcggcaagccgaaagaaaaggtctatgcccatgaaattgcagaagcttgggaaacgggcaagggtctggaacgtgtcgctaaatatagcatggaagatgcgaaggtgacctacgaactgggtcgtgaatttttcccgatggaagcacagctgagccgcctggtcggccaaccgctgtgggatgtgtctcgtagttccaccggtaacctggtggaatggtatctgctgcgtaaagcgtatgaacgcaacgaactggcaccgaataaaccggatgaacgtgaatatgaacgtcgcctgcgcgaatcttatgccggcggttacgttaaggaaccggaaaaaggcctgtgggaaggtctggtgtctctggattttcgctcactgtacccgtcgattatcattacgcataacgtgtccccggacaccctgaatcgtgaaggctgcatggaatatgatgttgctccggaagtcaaacacaagttttgtaaagactttccgggtttcattccgtcactgctgaaacgtctgctggatgaacgccaggaaatcaaacgtcgcatgaaagcctcgaaggatccgattgaaaagaaaatgctggactatcgtcaacgcgcaatcaaaattctggctaatagctattacggctattacggttatgcgaaggcccgctggtactgcaaagaatgtgcggaatctgtcacggcctggggccgtgaatatatcgaatttgtgcgcaaagaactggaagaaaagttcggtttcaaggttctgtacattgatacggacggcctgtacgcaaccatcccgggtgctaaaccggaagaaattaagcgtaaggccctggaatttgtggaatacatcaacgcaaaactgccgggcctgctggaactggaatatgaaggcttctacgttcgcggctttttcgtcacgaagaaaaagtatgcgctgattgacgaagaaggcaaaatcattacccgtggtctggaaatcgttcgtcgcgattggagtgaaattgccaaagaaacccaggcaaaggttctggaagcaattctgaaacatggtaacgtcgaagaagcggtcaagatcgtgaaagaagttaccgaaaaactgtcgaattatgaaattccggtcgaaaagctggtgatctacgaacaaattacgcgcccgctgaacgaatataaagccattggcccgcacgtggcagttgctaaacgtctggcggccaagggtatcaagattaaaccgggcatggtgattggttatgttgtcctgcgcggcgatggtccgatcagcaaacgtgcgatcgccatcgaagaattcgatggcaaaaagcataagtacgacgcagaatactacatcgaaaatcaggttctgccggccgtcgaacgtatcctgaaagcattcggttataagcgtgaagatctgcgctggcagaagaccaaacaagtgggcctgggtgcgtggctgaaagttaaaaagtcttaa

SEQ ID NO: 539 - DNA, 2331 bp, Artificial Sequence
  Synthetic
atgatcctggacgcaaactacattaccgaagatggcaaaccgattatccgcattttcaagaaggaaaacggcgaatttaaggtggaatatgaccgtaactttcgcccgtatatttacgctctgctgaaagatgacagccagatcgatgaagtgaaaaagattaccgcggaacgtcatggcaaaatcgttcgcattgttgatgtcgaaaaggtcaaaaagaaatttctgggtcgcccgattgaagtgtggaaactgtatttcgaacatccgcaagatgttccggctatccgtgacaaaattcgcgaacacccggcggtggttgatatctttgaatatgacattccgttcgcgaagcgttacctgatcgataaaggcctgattccgatggaaggtgacgaagaactgaaactgctggcctttgatattgaaacgctgtaccacgaaggcgaagaattcgcaaaaggtccgattatcatgatcagctatgcggacgaagaaggcgccaaagttattacctggaagaaagtcgatctgccgtatgtggaagtcgtgagctctgaacgtgaaatgatcaaacgctttctgaaagtgattcgcgaaaaagatccggacgttattatcacctataacggcgatagtttcgacctgccgtacctggtgaaacgtgccgaaaagctgggtattaaactgccgctgggtcgtgacggttccgaaccgaaaatgcagcgcctgggcgatatgacggcagttgaaatcaaaggtcgcattcattttgatctgtaccacgtgatccgtcgcaccattaatctgccgacctatacgctggaagcagtttacgaagctatcttcggcaagccgaaagaaaaggtctatgcccatgaaattgcagaagcttgggaaacgggcaagggtctggaacgtgtcgctaaatatagcatggaagatgcgaaggtgacctacgaactgggtcgtgaatttttcccgatggaagcacagctgagccgcctggtcggccaaccgctgtgggatgtgtctcgtagttccaccggtaacctggtggaatggtatctgctgcgtaaagcgtatgaacgcaacgaactggcaccgaataaaccggatgaacgtgaatatgaacgtcgcctgcgcgaatcttatgccggcggttacgttaaggaaccggaaaaaggcctgtgggaaggtctggtgtctctggattttcgctcactgtacccgtcgattatcattacgcataacgtgtccccggacaccctgaatcgtgaaggctgcatggaatatgatgttgctccggaagtcaaacacaagttttgtaaagactttccgggtttcattccgtcactgctgaaacgtctgctggatgaacgccaggaaatcaaacgtcgcatgaaagcctcgaaggatccgattgaaaagaaaatgctggactatcgtcaacgcgcaatcaaaattctggctaatagctattacggctattacggttatgcgaaggcccgctggtactgcaaagaatgtgcggaatctgtcacggcctggggccgtgaatatatcgaatttgtgcgcaaagaactggaagaaaagttcggtttcaaggttctgtacattgatacggacggcctgtacgcaaccatcccgggtgctaaaccggaagaaattaagcgtaaggccctggaatttgtggaatacatcaacgcaaaactgccgggcctgctggaactggaatatgaaggcttctacgttcgcggctttttcgtcacgaagaaaaagtatgcgctgattgacgaagaaggcaaaatcattacccgtggtctggaaatcgttcgtcgcgattggagtgaaattgccaaagaaacccaggcacgtgttctggaagcactgctgaaagatggtaatgtcgaagaagcagtgagtattgttaaagaagtcacggaaaaactgtccaagtatgaagtcccgccggaaaaactggtgattcatgaacaaatcacccgcgaactgaaagattacaaggcgacgggcccgcacgtggcaattgctaaacgtctggcagcgcgtggcgttaagatccgtccgggtaccgttattagctatatcgtcctgaaaggctctggtcgtattggtgaccgcgccatcccgtttgatgaattcgacccggctaaacaccgctacgatgcggaatattacattgaaaatcaggtcctgccggctgtggaacgtatcctgaaagcgtttggctatcgtaaggaagatctgcgctaccagaaaacccgtcaagtgggcctgggtgcgtggctgaaaccgaagggtaaaaagtaa

SEQ ID NO: 540 - DNA, 2331 bp, Artificial Sequence
  Synthetic
atgatcctggacgcaaactacattaccgaagatggcaaaccgattatccgcattttcaagaaggaaaacggcgaatttaaggtggaatatgaccgtaactttcgcccgtatatttacgctctgctgaaagatgacagccagatcgatgaagtgaaaaagattaccgcggaacgtcatggcaaaatcgttcgcattgttgatgtcgaaaaggtcaaaaagaaatttctgggtcgcccgattgaagtgtggaaactgtatttcgaacatccgcaagatgttccggctatccgtgacaaaattcgcgaacacccggcggtggttgatatctttgaatatgacattccgttcgcgaagcgttacctgatcgataaaggcctgattccgatggaaggtgacgaagaactgaaactgctggcctttgatattgaaacgctgtaccacgaaggcgaagaattcgcaaaaggtccgattatcatgatcagctatgcggacgaagaaggcgccaaagttattacctggaagaaagtcgatctgccgtatgtggaagtcgtgagctctgaacgtgaaatgatcaaacgctttctgaaagtgattcgcgaaaaagatccggacgttattatcacctataacggcgatagtttcgacctgccgtacctggtgaaacgtgccgaaaagctgggtattaaactgccgctgggtcgtgacggttccgaaccgaaaatgcagcgcctgggcgatatgacggcagttgaaatcaaaggtcgcattcattttgatctgtaccacgtgatccgtcgcaccattaatctgccgacctatacgctggaagcagtttacgaagctatcttcggcaagccgaaagaaaaggtctatgcccatgaaattgcagaagcttgggaaacgggcaagggtctggaacgtgtcgctaaatatagcatggaagatgcgaaggtgacctacgaactgggtcgtgaatttttcccgatggaagcacagctgagccgcctggtcggccaaccgctgtgggatgtgtctcgtagttccaccggtaacctggtggaatggtatctgctgcgtaaagcgtatgaacgcaacgaactggcaccgaataaaccggatgaacgtgaatatgaacgtcgcctgcgcgaatcttatgccggcggttacgttaaggaaccggaaaaaggcctgtgggaaggtctggtgtctctggattttcgctcactgtacccgtcgattatcattacgcataacgtgtccccggacaccctgaatcgtgaaggctgcatggaatatgatgttgctccggaagtcaaacacaagttttgtaaagactttccgggtttcattccgtcactgctgaaacgtctgctggatgaacgccaggaaatcaaacgtcgcatgaaagcctcgaaggatccgattgaaaagaaaatgctggactatcgtcaacgcgcaatcaaaattctggctaatagctattacggctattacggttatgcgaaggcccgctggtactgcaaagaatgtgcggaatctgtcacggcctggggccgtgaatatatcgaatttgtgcgcaaagaactggaagaaaagttcggtttcaaggttctgtacattgatacggacggcctgtacgcaaccatcccgggtgctaaaccggaagaaattaagcgtaaggccctggaatttgtggaatacatcaacgcaaaactgccgggcctgctggaactggaatatgaaggcttctacgttcgcggctttttcgtcacgaagaaaaagtatgcgctgattgacgaagaaggcaaaatcattacccgtggtctggaaatcgttcgtcgcgattggagtgaaattgccaaagaaacccaggcacgcgtcctggaagcaatcctgaaagatggtgacgtggaagaagccgtccgtattgtgaaagaagttacggaaaaactgtccaaatatgaagttccgccggaaaaactggtcatccatgaacaaattacccgcgaactgaaagattacaaagcgacgggcccgcacgtcgcaatcgctaaacgtctggcggcgcgtggcgtgaaaattcgtccgggtaccgtgatctcatatattgttctgaaaggctcgggtcgtatcggtgaccgcgctattccgtttgatgaattcgacccgaaaaaacacaaatacgatgcggaatactacatcgaaaaccaggttctgccggccgtcgaacgtattctgcgcgcatttggctaccgtaaagaagatctgcgttatcaaaaaaccaaacaagtgggtctgggtgcgtggctgaaaccgaaaggtaaaaaataa

SEQ ID NO: 541 - DNA, 2328 bp, Artificial Sequence
  Synthetic
atgatcctggacgcaaactacattaccgaagatggcaaaccgattatccgcattttcaagaaggaaaacggcgaatttaaggtggaatatgaccgtaactttcgcccgtatatttacgctctgctgaaagatgacagccagatcgatgaagtgaaaaagattaccgcggaacgtcatggcaaaatcgttcgcattgttgatgtcgaaaaggtcaaaaagaaatttctgggtcgcccgattgaagtgtggaaactgtatttcgaacatccgcaagatgttccggctatccgtgacaaaattcgcgaacacccggcggtggttgatatctttgaatatgacattccgttcgcgaagcgttacctgatcgataaaggcctgattccgatggaaggtgacgaagaactgaaactgctggcctttgatattgaaacgctgtaccacgaaggcgaagaattcgcaaaaggtccgattatcatgatcagctatgcggacgaagaaggcgccaaagttattacctggaagaaagtcgatctgccgtatgtggaagtcgtgagctctgaacgtgaaatgatcaaacgctttctgaaagtgattcgcgaaaaagatccggacgttattatcacctataacggcgatagtttcgacctgccgtacctggtgaaacgtgccgaaaagctgggtattaaactgccgctgggtcgtgacggttccgaaccgaaaatgcagcgcctgggcgatatgacggcagttgaaatcaaaggtcgcattcattttgatctgtaccacgtgatccgtcgcaccattaatctgccgacctatacgctggaagcagtttacgaagctatcttcggcaagccgaaagaaaaggtctatgcccatgaaattgcagaagcttgggaaacgggcaagggtctggaacgtgtcgctaaatatagcatggaagatgcgaaggtgacctacgaactgggtcgtgaatttttcccgatggaagcacagctgagccgcctggtcggccaaccgctgtgggatgtgtctcgtagttccaccggtaacctggtggaatggtatctgctgcgtaaagcgtatgaacgcaacgaactggcaccgaataaaccggatgaacgtgaatatgaacgtcgcctgcgcgaatcttatgccggcggttacgttaaggaaccggaaaaaggcctgtgggaaggtctggtgtctctggattttcgctcactgtacccgtcgattatcattacgcataacgtgtccccggacaccctgaatcgtgaaggctgcatggaatatgatgttgctccggaagtcaaacacaagttttgtaaagactttccgggtttcattccgtcactgctgaaacgtctgctggatgaacgccaggaaatcaaacgtcgcatgaaagcctcgaaggatccgattgaaaagaaaatgctggactatcgtcaacgcgcaatcaaaattctggctaatagctattacggctattacggttatgcgaaggcccgctggtactgcaaagaatgtgcggaatctgtcacggcctggggccgtgaatatatcgaatttgtgcgcaaagaactggaagaaaagttcggtttcaaggttctgtacattgatacggacggcctgtacgcaaccatcccgggtgctaaaccggaagaaattaagcgtaaggccctggaatttgtggaatacatcaacgcaaaactgccgggcctgctggaactggaatatgaaggcttctacgttcgcggctttttcgtcacgaagaaaaagtatgcgctgattgacgaagaaggcaaaatcattacccgtggtctggaaatcgttcgtcgcgattggagtgaaattgccaaagaaacccaggcacgtgttctggaagcaattctgaaacatggtaacgtcgaagaagcggtcaaaatcgtgaaagaagttacggaaaaactgtctaactacgaaattccgccggaaaaactggccatctacgaacaaattacccgcccgctgcatgaatataaagcaatcggtccgcacgtcgcagtggcaaaacgtctggcagcacgcggcgttaaagtcaaaccgggtatggtcatcggctatattgtgctgcgtggtgatggcccgatcagcaaccgcgcaattctggctgaagaatacgatctgaaaaaacacaaatacgacgccgaatattacatcgaaaatcaggttctgccggctgtcctgcgtattctggaagcgtttggctatcgtaaagaagatctgcgctggcagaaaacccgtcaaacgggtctgacctcatggctgaatattaaaaaatcgtaa

SEQ ID NO: 542 - DNA, 2328 bp, Artificial Sequence
  Synthetic
atgatcctggacgcaaactacattaccgaagatggcaaaccgattatccgcattttcaagaaggaaaacggcgaatttaaggtggaatatgaccgtaactttcgcccgtatatttacgctctgctgaaagatgacagccagatcgatgaagtgaaaaagattaccgcggaacgtcatggcaaaatcgttcgcattgttgatgtcgaaaaggtcaaaaagaaatttctgggtcgcccgattgaagtgtggaaactgtatttcgaacatccgcaagatgttccggctatccgtgacaaaattcgcgaacacccggcggtggttgatatctttgaatatgacattccgttcgcgaagcgttacctgatcgataaaggcctgattccgatggaaggtgacgaagaactgaaactgctggcctttgatattgaaacgctgtaccacgaaggcgaagaattcgcaaaaggtccgattatcatgatcagctatgcggacgaagaaggcgccaaagttattacctggaagaaagtcgatctgccgtatgtggaagtcgtgagctctgaacgtgaaatgatcaaacgctttctgaaagtgattcgcgaaaaagatccggacgttattatcacctataacggcgatagtttcgacctgccgtacctggtgaaacgtgccgaaaagctgggtattaaactgccgctgggtcgtgacggttccgaaccgaaaatgcagcgcctgggcgatatgacggcagttgaaatcaaaggtcgcattcattttgatctgtaccacgtgatccgtcgcaccattaatctgccgacctatacgctggaagcagtttacgaagctatcttcggcaagccgaaagaaaaggtctatgcccatgaaattgcagaagcttgggaaacgggcaagggtctggaacgtgtcgctaaatatagcatggaagatgcgaaggtgacctacgaactgggtcgtgaatttttcccgatggaagcacagctgagccgcctggtcggccaaccgctgtgggatgtgtctcgtagttccaccggtaacctggtggaatggtatctgctgcgtaaagcgtatgaacgcaacgaactggcaccgaataaaccggatgaacgtgaatatgaacgtcgcctgcgcgaatcttatgccggcggttacgttaaggaaccggaaaaaggcctgtgggaaggtctggtgtctctggattttcgctcactgtacccgtcgattatcattacgcataacgtgtccccggacaccctgaatcgtgaaggctgcatggaatatgatgttgctccggaagtcaaacacaagttttgtaaagactttccgggtttcattccgtcactgctgaaacgtctgctggatgaacgccaggaaatcaaacgtcgcatgaaagcctcgaaggatccgattgaaaagaaaatgctggactatcgtcaacgcgcaatcaaaattctggctaatagctattacggctattacggttatgcgaaggcccgctggtactgcaaagaatgtgcggaatctgtcacggcctggggccgtgaatatatcgaatttgtgcgcaaagaactggaagaaaagttcggtttcaaggttctgtacattgatacggacggcctgtacgcaaccatcccgggtgctaaaccggaagaaattaagcgtaaggccctggaatttgtggaatacatcaacgcaaaactgccgggcctgctggaactggaatatgaaggcttctacgttcgcggctttttcgtcacgaagaaaaagtatgcgctgattgacgaagaaggcaaaatcattacccgtggtctggaaatcgttcgtcgcgattggagtgaaattgccaaagaaacccaggcaaaagttctggaagcaatcctgaaacatggtaatgtcgaagaagcagtgaaaattgtcaaggaagtgacggaaaaactgtcgaagtatgaaatcccgccggaaaaactggtgatctacgaacaaattacccgcccgctgcatgaatataaagcgattggcccgcacgtggcagttgctaaacgtctggcagcccgcggtgtcaaagtgcgtccgggcatggtgatcggttatattgttctgcgtggcgatggtccgatcagtaaacgcgcgattctggccgaagaatttgatccgcgcaaacacaagtacgacgccgaatattacatcgaaaaccaggtgctgccggctgttctgcgtattctggaagcgttcggctatcgtaaagaagatctgcgctggcagaaaaccaagcaaacgggtctgaccgcatggctgaatgtgaaaaagaaataa

SEQ ID NO: 543 - DNA, 2331 bp, Artificial Sequence
  Synthetic
atgatcctggacgcaaactacattaccgaagatggcaaaccgattatccgcattttcaagaaggaaaacggcgaatttaaggtggaatatgaccgtaactttcgcccgtatatttacgctctgctgaaagatgacagccagatcgatgaagtgaaaaagattaccgcggaacgtcatggcaaaatcgttcgcattgttgatgtcgaaaaggtcaaaaagaaatttctgggtcgcccgattgaagtgtggaaactgtatttcgaacatccgcaagatgttccggctatccgtgacaaaattcgcgaacacccggcggtggttgatatctttgaatatgacattccgttcgcgaagcgttacctgatcgataaaggcctgattccgatggaaggtgacgaagaactgaaactgctggcctttgatattgaaacgctgtaccacgaaggcgaagaattcgcaaaaggtccgattatcatgatcagctatgcggacgaagaaggcgccaaagttattacctggaagaaagtcgatctgccgtatgtggaagtcgtgagctctgaacgtgaaatgatcaaacgctttctgaaagtgattcgcgaaaaagatccggacgttattatcacctataacggcgatagtttcgacctgccgtacctggtgaaacgtgccgaaaagctgggtattaaactgccgctgggtcgtgacggttccgaaccgaaaatgcagcgcctgggcgatatgacggcagttgaaatcaaaggtcgcattcattttgatctgtaccacgtgatccgtcgcaccattaatctgccgacctatacgctggaagcagtttacgaagctatcttcggcaagccgaaagaaaaggtctatgcccatgaaattgcagaagcttgggaaacgggcaagggtctggaacgtgtcgctaaatatagcatggaagatgcgaaggtgacctacgaactgggtcgtgaatttttcccgatggaagcacagctgagccgcctggtcggccaaccgctgtgggatgtgtctcgtagttccaccggtaacctggtggaatggtatctgctgcgtaaagcgtatgaacgcaacgaagtggcaccgaataaaccggatgaacgtgaatatcagcgtcgcctgcgcgaaagttatgcaggcggttacgtgaaagaaccggaaaaaggtctgtgggaaggcctggtttatctggattttcgtgcgctgtacccgagcattatcattacgcataacgtttctccggacaccctgaatcgtgaaggctgccgcgaatatgatattgcgccggaagtgggtcacaaattttgtaaagatatcccgggcttcattccgagcctgctgaaacgtctgctggaagaacgccagaaaatcaaaacgaaaatgaaagaaacccaagatccgatcgaaaaaattctgctggactaccgtcagcgcgcgatcaaaattctggccaacagttattacggttattacggctatgcaaaagctcgctggtactgcaaagaatgtgcagaatccgttaccgcttggggtcgtaaatacatcgaattcgtctggaaagaactggaagaaaaattcggtttcaaagttctgtacatcgatacggacggtctgtacgcaaccatcccgggcggtaaaccggaagaaattaagaaaaaagccctggaatttgtggattacattaatgcaaaactgccgggcctgctggaactggaatatgaaggtttctacgtgcgtggctttttcgttaccaagaaaaaatatgccgtcattgacgaagaaggtaaagtgatcacccgcggcctggaaattgttcgtcgcgattggagtgaaattgccaaagaaacccaggcacgcgttctggaagcaatcctgcgtcatggtgacgtcgaagaagccgttcgcattgtcaaagatgtgacggaaaagctgtcgaaatatgaagtcccgccggaaaaactggtgatccatgaacaaattacccgtgaactgaaggattacaaagcgacgggcccgcacgttgcaattgctaaacgcctggcagcccgtggcatcaagattcgtccgggtaccgttatcagctatattgtcctgaaaggctctggtcgcatcggtgatcgtgctattccgtttgatgaattcgacccgacgaaacaccgttacgatgccgaatattacatcgaaaatcaggtgctgccggccgttgaacgcattctgaaagcatttggctataagaaagaagaactgcgctaccagaaaacccgtcaagtgggcctgggtgcgtggctgaagctgaaaggtaagaaataa

SEQ ID NO: 544 - DNA, 2325 bp, Artificial Sequence
  Synthetic
atgatcctggacgcaaactacattaccgaagatggcaaaccgattatccgcattttcaagaaggaaaacggcgaatttaaggtggaatatgaccgtaactttcgcccgtatatttacgctctgctgaaagatgacagccagatcgatgaagtgaaaaagattaccgcggaacgtcatggcaaaatcgttcgcattgttgatgtcgaaaaggtcaaaaagaaatttctgggtcgcccgattgaagtgtggaaactgtatttcgaacatccgcaagatgttccggctatccgtgacaaaattcgcgaacacccggcggtggttgatatctttgaatatgacattccgttcgcgaagcgttacctgatcgataaaggcctgattccgatggaaggtgacgaagaactgaaactgctggcctttgatattgaaacgctgtaccacgaaggcgaagaattcgcaaaaggtccgattatcatgatcagctatgcggacgaagaaggcgccaaagttattacctggaagaaagtcgatctgccgtatgtggaagtcgtgagctctgaacgtgaaatgatcaaacgctttctgaaagtgattcgcgaaaaagatccggacgttattatcacctataacggcgatagtttcgacctgccgtacctggtgaaacgtgccgaaaagctgggtattaaactgccgctgggtcgtgacggttccgaaccgaaaatgcagcgcctgggcgatatgacggcagttgaaatcaaaggtcgcattcattttgatctgtaccacgtgatccgtcgcaccattaatctgccgacctatacgctggaagcagtttacgaagctatcttcggcaagccgaaagaaaaggtctatgcccatgaaattgcagaagcttgggaaacgggcaagggtctggaacgtgtcgctaaatatagcatggaagatgcgaaggtgacctacgaactgggtcgtgaatttttcccgatggaagcacagctgagccgcctggtcggccaaccgctgtgggatgtgtctcgtagttccaccggtaacctggtggaatggtatctgctgcgtaaagcgtatgaacgcaacgaagtggcaccgaataaaccggatgaacgtgaatatcagcgtcgcctgcgcgaaagttatgcaggcggttacgtgaaagaaccggaaaaaggtctgtgggaaggcctggtttatctggattttcgtgcgctgtacccgagcattatcattacgcataacgtttctccggacaccctgaatcgtgaaggctgccgcgaatatgatattgcgccggaagtgggtcacaaattttgtaaagatatcccgggcttcattccgagcctgctgaaacgtctgctggaagaacgccagaaaatcaaaacgaaaatgaaagaaacccaagatccgatcgaaaaaattctgctggactaccgtcagcgcgcgatcaaaattctggccaacagttattacggttattacggctatgcaaaagctcgctggtactgcaaagaatgtgcagaatccgttaccgcttggggtcgtaaatacatcgaattcgtctggaaagaactggaagaaaaattcggtttcaaagttctgtacatcgatacggacggtctgtacgcaaccatcccgggcggtaaaccggaagaaattaagaaaaaagccctggaatttgtggattacattaatgcaaaactgccgggcctgctggaactggaatatgaaggtttctacgtgcgtggctttttcgttaccaagaaaaaatatgccgtcattgacgaagaaggtaaagtgatcacccgcggcctggaaattgttcgtcgcgattggagtgaaattgccaaagaaacccaggcacgtgtcctggaagcaatcctgaaacatggtgatgtggaagaagcggttcgcattgtcaaagaagtgacggaaaagctgtcgaaatatgaagttccgccggaaaaactggtcatccatgaacaaattacccgcgatctgcgtgactacaaagccacgggtccgcacgtggcagttgcaaaacgtctggcagcccgtggcgtgaagattcgtccgggtaccgtgatcagttatattgttctgaaaggctccggtcgcatcggtgaccgtgctattccgtttgatgaattcgacccgacgaaacaccgttacgatgccgaatattacatcgaaaatcaggtcctgccggccgtggaacgcattctgaaagcatttggttatcgcaaggaagatctgcgttaccagaagaccaaacaagtcggcctgggtgcgtggctgaaagtgaaaaagtaa

SEQ ID NO: 545 - DNA, 2331 bp, Artificial Sequence
  Synthetic
atgatcctggacgcaaactacattaccgaagatggcaaaccgattatccgcattttcaagaaggaaaacggcgaatttaaggtggaatatgaccgtaactttcgcccgtatatttacgctctgctgaaagatgacagccagatcgatgaagtgaaaaagattaccgcggaacgtcatggcaaaatcgttcgcattgttgatgtcgaaaaggtcaaaaagaaatttctgggtcgcccgattgaagtgtggaaactgtatttcgaacatccgcaagatgttccggctatccgtgacaaaattcgcgaacacccggcggtggttgatatctttgaatatgacattccgttcgcgaagcgttacctgatcgataaaggcctgattccgatggaaggtgacgaagaactgaaactgctggcctttgatattgaaacgctgtaccacgaaggcgaagaattcgcaaaaggtccgattatcatgatcagctatgcggacgaagaaggcgccaaagttattacctggaagaaagtcgatctgccgtatgtggaagtcgtgagctctgaacgtgaaatgatcaaacgctttctgaaagtgattcgcgaaaaagatccggacgttattatcacctataacggcgatagtttcgacctgccgtacctggtgaaacgtgccgaaaagctgggtattaaactgccgctgggtcgtgacggttccgaaccgaaaatgcagcgcctgggcgatatgacggcagttgaaatcaaaggtcgcattcattttgatctgtaccacgtgatccgtcgcaccattaatctgccgacctatacgctggaagcagtttacgaagctatcttcggcaagccgaaagaaaaggtctatgcccatgaaattgcagaagcttgggaaacgggcaagggtctggaacgtgtcgctaaatatagcatggaagatgcgaaggtgacctacgaactgggtcgtgaatttttcccgatggaagcacagctgagccgcctggtcggccaaccgctgtgggatgtgtctcgtagttccaccggtaacctggtggaatggtatctgctgcgtaaagcgtatgaacgcaacgaagtggcaccgaataaaccggatgaacgtgaatatcagcgtcgcctgcgcgaaagttatgcaggcggttacgtgaaagaaccggaaaaaggtctgtgggaaggcctggtttatctggattttcgtgcgctgtacccgagcattatcattacgcataacgtttctccggacaccctgaatcgtgaaggctgccgcgaatatgatattgcgccggaagtgggtcacaaattttgtaaagatatcccgggcttcattccgagcctgctgaaacgtctgctggaagaacgccagaaaatcaaaacgaaaatgaaagaaacccaagatccgatcgaaaaaattctgctggactaccgtcagcgcgcgatcaaaattctggccaacagttattacggttattacggctatgcaaaagctcgctggtactgcaaagaatgtgcagaatccgttaccgcttggggtcgtaaatacatcgaattcgtctggaaagaactggaagaaaaattcggtttcaaagttctgtacatcgatacggacggtctgtacgcaaccatcccgggcggtaaaccggaagaaattaagaaaaaagccctggaatttgtggattacattaatgcaaaactgccgggcctgctggaactggaatatgaaggtttctacgtgcgtggctttttcgttaccaagaaaaaatatgccgtcattgacgaagaaggtaaagtgatcacccgcggcctggaaattgttcgtcgcgattggagtgaaattgccaaagaaacccaggcacgtgtgctggaagctctgctgaaagatggcaatgttgaagaagcggtttccattgtcaaagaagtgacggaaaagctgggtaaatatgaagtcccgccggaaaaactggtgatccatgaacaaattacccgcgaactgaaggattacaaagcgacgggcccgcacgttgctatcgcgaaacgtctggcagcgcgtggcgtgaagattcgtccgggtaccgttatcagctatattgtcctgaaaggctctggtcgtatcggtgaccgcgcgattccgtttgatgaattcgacccgacgaaacatcgctacgatgcagaatattacatcgaaaaccaggttctgccggctgtcgaacgtattctgaaagcgtttggctatcgtgccgaagatctgcgctaccagaaaacccgtcaagtgggcctgggtgtttggctgcaaccgaaaggtaagaaataa

SEQ ID NO: 546 - DNA, 2328 bp, Artificial Sequence
  Synthetic
atgatcctggacgcaaactacattaccgaagatggcaaaccgattatccgcattttcaagaaggaaaacggcgaatttaaggtggaatatgaccgtaactttcgcccgtatatttacgctctgctgaaagatgacagccagatcgatgaagtgaaaaagattaccgcggaacgtcatggcaaaatcgttcgcattgttgatgtcgaaaaggtcaaaaagaaatttctgggtcgcccgattgaagtgtggaaactgtatttcgaacatccgcaagatgttccggctatccgtgacaaaattcgcgaacacccggcggtggttgatatctttgaatatgacattccgttcgcgaagcgttacctgatcgataaaggcctgattccgatggaaggtgacgaagaactgaaactgctggcctttgatattgaaacgctgtaccacgaaggcgaagaattcgcaaaaggtccgattatcatgatcagctatgcggacgaagaaggcgccaaagttattacctggaagaaagtcgatctgccgtatgtggaagtcgtgagctctgaacgtgaaatgatcaaacgctttctgaaagtgattcgcgaaaaagatccggacgttattatcacctataacggcgatagtttcgacctgccgtacctggtgaaacgtgccgaaaagctgggtattaaactgccgctgggtcgtgacggttccgaaccgaaaatgcagcgcctgggcgatatgacggcagttgaaatcaaaggtcgcattcattttgatctgtaccacgtgatccgtcgcaccattaatctgccgacctatacgctggaagcagtttacgaagctatcttcggcaagccgaaagaaaaggtctatgcccatgaaattgcagaagcttgggaaacgggcaagggtctggaacgtgtcgctaaatatagcatggaagatgcgaaggtgacctacgaactgggtcgtgaatttttcccgatggaagcacagctgagccgcctggtcggccaaccgctgtgggatgtgtctcgtagttccaccggtaacctggtggaatggtatctgctgcgtaaagcgtatgaacgcaacgaagtggcaccgaataaaccggatgaacgtgaatatcagcgtcgcctgcgcgaaagttatgcaggcggttacgtgaaagaaccggaaaaaggtctgtgggaaggcctggtttatctggattttcgtgcgctgtacccgagcattatcattacgcataacgtttctccggacaccctgaatcgtgaaggctgccgcgaatatgatattgcgccggaagtgggtcacaaattttgtaaagatatcccgggcttcattccgagcctgctgaaacgtctgctggaagaacgccagaaaatcaaaacgaaaatgaaagaaacccaagatccgatcgaaaaaattctgctggactaccgtcagcgcgcgatcaaaattctggccaacagttattacggttattacggctatgcaaaagctcgctggtactgcaaagaatgtgcagaatccgttaccgcttggggtcgtaaatacatcgaattcgtctggaaagaactggaagaaaaattcggtttcaaagttctgtacatcgatacggacggtctgtacgcaaccatcccgggcggtaaaccggaagaaattaagaaaaaagccctggaatttgtggattacattaatgcaaaactgccgggcctgctggaactggaatatgaaggtttctacgtgcgtggctttttcgttaccaagaaaaaatatgccgtcattgacgaagaaggtaaagtgatcacccgcggcctggaaattgttcgtcgcgattggagtgaaattgccaaagaaacccaggcaaaggttctggaagcaattctgaaacatggtaacgtcgaagaagcggtcaagatcgtgaaagaagttaccgaaaaactgtcgaattatgaaattccggtcgaaaagctggtgatctacgaacaaattacgcgcccgctgaacgaatataaagccattggcccgcacgtggcagttgctaaacgtctggcggccaagggtatcaagattaaaccgggcatggtgattggttatgttgtcctgcgcggcgatggtccgatcagcaaacgtgcgatcgccatcgaagaattcgatggcaaaaagcataagtacgacgcagaatactacatcgaaaatcaggttctgccggccgtcgaacgtatcctgaaagcattcggttataagcgtgaagatctgcgctggcagaagaccaaacaagtgggcctgggtgcgtggctgaaagttaaaaagtcttaa

SEQ ID NO: 547 - DNA, 2331 bp, Artificial Sequence
  Synthetic
atgatcctggacgcaaactacattaccgaagatggcaaaccgattatccgcattttcaagaaggaaaacggcgaatttaaggtggaatatgaccgtaactttcgcccgtatatttacgctctgctgaaagatgacagccagatcgatgaagtgaaaaagattaccgcggaacgtcatggcaaaatcgttcgcattgttgatgtcgaaaaggtcaaaaagaaatttctgggtcgcccgattgaagtgtggaaactgtatttcgaacatccgcaagatgttccggctatccgtgacaaaattcgcgaacacccggcggtggttgatatctttgaatatgacattccgttcgcgaagcgttacctgatcgataaaggcctgattccgatggaaggtgacgaagaactgaaactgctggcctttgatattgaaacgctgtaccacgaaggcgaagaattcgcaaaaggtccgattatcatgatcagctatgcggacgaagaaggcgccaaagttattacctggaagaaagtcgatctgccgtatgtggaagtcgtgagctctgaacgtgaaatgatcaaacgctttctgaaagtgattcgcgaaaaagatccggacgttattatcacctataacggcgatagtttcgacctgccgtacctggtgaaacgtgccgaaaagctgggtattaaactgccgctgggtcgtgacggttccgaaccgaaaatgcagcgcctgggcgatatgacggcagttgaaatcaaaggtcgcattcattttgatctgtaccacgtgatccgtcgcaccattaatctgccgacctatacgctggaagcagtttacgaagctatcttcggcaagccgaaagaaaaggtctatgcccatgaaattgcagaagcttgggaaacgggcaagggtctggaacgtgtcgctaaatatagcatggaagatgcgaaggtgacctacgaactgggtcgtgaatttttcccgatggaagcacagctgagccgcctggtcggccaaccgctgtgggatgtgtctcgtagttccaccggtaacctggtggaatggtatctgctgcgtaaagcgtatgaacgcaacgaagtggcaccgaataaaccggatgaacgtgaatatcagcgtcgcctgcgcgaaagttatgcaggcggttacgtgaaagaaccggaaaaaggtctgtgggaaggcctggtttatctggattttcgtgcgctgtacccgagcattatcattacgcataacgtttctccggacaccctgaatcgtgaaggctgccgcgaatatgatattgcgccggaagtgggtcacaaattttgtaaagatatcccgggcttcattccgagcctgctgaaacgtctgctggaagaacgccagaaaatcaaaacgaaaatgaaagaaacccaagatccgatcgaaaaaattctgctggactaccgtcagcgcgcgatcaaaattctggccaacagttattacggttattacggctatgcaaaagctcgctggtactgcaaagaatgtgcagaatccgttaccgcttggggtcgtaaatacatcgaattcgtctggaaagaactggaagaaaaattcggtttcaaagttctgtacatcgatacggacggtctgtacgcaaccatcccgggcggtaaaccggaagaaattaagaaaaaagccctggaatttgtggattacattaatgcaaaactgccgggcctgctggaactggaatatgaaggtttctacgtgcgtggctttttcgttaccaagaaaaaatatgccgtcattgacgaagaaggtaaagtgatcacccgcggcctggaaattgttcgtcgcgattggagtgaaattgccaaagaaacccaggcacgtgttctggaagcactgctgaaagatggtaatgtcgaagaagcagtgagtattgttaaagaagtcacggaaaaactgtccaagtatgaagtcccgccggaaaaactggtgattcatgaacaaatcacccgcgaactgaaagattacaaggcgacgggcccgcacgtggcaattgctaaacgtctggcagcgcgtggcgttaagatccgtccgggtaccgttattagctatatcgtcctgaaaggctctggtcgtattggtgaccgcgccatcccgtttgatgaattcgacccggctaaacaccgctacgatgcggaatattacattgaaaatcaggtcctgccggctgtggaacgtatcctgaaagcgtttggctatcgtaaggaagatctgcgctaccagaaaacccgtcaagtgggcctgggtgcgtggctgaaaccgaagggtaaaaagtaa

SEQ ID NO: 548 - DNA, 2331 bp, Artificial Sequence
  Synthetic
atgatcctggacgcaaactacattaccgaagatggcaaaccgattatccgcattttcaagaaggaaaacggcgaatttaaggtggaatatgaccgtaactttcgcccgtatatttacgctctgctgaaagatgacagccagatcgatgaagtgaaaaagattaccgcggaacgtcatggcaaaatcgttcgcattgttgatgtcgaaaaggtcaaaaagaaatttctgggtcgcccgattgaagtgtggaaactgtatttcgaacatccgcaagatgttccggctatccgtgacaaaattcgcgaacacccggcggtggttgatatctttgaatatgacattccgttcgcgaagcgttacctgatcgataaaggcctgattccgatggaaggtgacgaagaactgaaactgctggcctttgatattgaaacgctgtaccacgaaggcgaagaattcgcaaaaggtccgattatcatgatcagctatgcggacgaagaaggcgccaaagttattacctggaagaaagtcgatctgccgtatgtggaagtcgtgagctctgaacgtgaaatgatcaaacgctttctgaaagtgattcgcgaaaaagatccggacgttattatcacctataacggcgatagtttcgacctgccgtacctggtgaaacgtgccgaaaagctgggtattaaactgccgctgggtcgtgacggttccgaaccgaaaatgcagcgcctgggcgatatgacggcagttgaaatcaaaggtcgcattcattttgatctgtaccacgtgatccgtcgcaccattaatctgccgacctatacgctggaagcagtttacgaagctatcttcggcaagccgaaagaaaaggtctatgcccatgaaattgcagaagcttgggaaacgggcaagggtctggaacgtgtcgctaaatatagcatggaagatgcgaaggtgacctacgaactgggtcgtgaatttttcccgatggaagcacagctgagccgcctggtcggccaaccgctgtgggatgtgtctcgtagttccaccggtaacctggtggaatggtatctgctgcgtaaagcgtatgaacgcaacgaagtggcaccgaataaaccggatgaacgtgaatatcagcgtcgcctgcgcgaaagttatgcaggcggttacgtgaaagaaccggaaaaaggtctgtgggaaggcctggtttatctggattttcgtgcgctgtacccgagcattatcattacgcataacgtttctccggacaccctgaatcgtgaaggctgccgcgaatatgatattgcgccggaagtgggtcacaaattttgtaaagatatcccgggcttcattccgagcctgctgaaacgtctgctggaagaacgccagaaaatcaaaacgaaaatgaaagaaacccaagatccgatcgaaaaaattctgctggactaccgtcagcgcgcgatcaaaattctggccaacagttattacggttattacggctatgcaaaagctcgctggtactgcaaagaatgtgcagaatccgttaccgcttggggtcgtaaatacatcgaattcgtctggaaagaactggaagaaaaattcggtttcaaagttctgtacatcgatacggacggtctgtacgcaaccatcccgggcggtaaaccggaagaaattaagaaaaaagccctggaatttgtggattacattaatgcaaaactgccgggcctgctggaactggaatatgaaggtttctacgtgcgtggctttttcgttaccaagaaaaaatatgccgtcattgacgaagaaggtaaagtgatcacccgcggcctggaaattgttcgtcgcgattggagtgaaattgccaaagaaacccaggcacgcgtcctggaagcaatcctgaaagatggtgacgtggaagaagccgtccgtattgtgaaagaagttacggaaaaactgtccaaatatgaagttccgccggaaaaactggtcatccatgaacaaattacccgcgaactgaaagattacaaagcgacgggcccgcacgtcgcaatcgctaaacgtctggcggcgcgtggcgtgaaaattcgtccgggtaccgtgatctcatatattgttctgaaaggctcgggtcgtatcggtgaccgcgctattccgtttgatgaattcgacccgaaaaaacacaaatacgatgcggaatactacatcgaaaaccaggttctgccggccgtcgaacgtattctgcgcgcatttggctaccgtaaagaagatctgcgttatcaaaaaaccaaacaagtgggtctgggtgcgtggctgaaaccgaaaggtaaaaaataa

SEQ ID NO: 549 - DNA, 2328 bp, Artificial Sequence
  Synthetic
atgatcctggacgcaaactacattaccgaagatggcaaaccgattatccgcattttcaagaaggaaaacggcgaatttaaggtggaatatgaccgtaactttcgcccgtatatttacgctctgctgaaagatgacagccagatcgatgaagtgaaaaagattaccgcggaacgtcatggcaaaatcgttcgcattgttgatgtcgaaaaggtcaaaaagaaatttctgggtcgcccgattgaagtgtggaaactgtatttcgaacatccgcaagatgttccggctatccgtgacaaaattcgcgaacacccggcggtggttgatatctttgaatatgacattccgttcgcgaagcgttacctgatcgataaaggcctgattccgatggaaggtgacgaagaactgaaactgctggcctttgatattgaaacgctgtaccacgaaggcgaagaattcgcaaaaggtccgattatcatgatcagctatgcggacgaagaaggcgccaaagttattacctggaagaaagtcgatctgccgtatgtggaagtcgtgagctctgaacgtgaaatgatcaaacgctttctgaaagtgattcgcgaaaaagatccggacgttattatcacctataacggcgatagtttcgacctgccgtacctggtgaaacgtgccgaaaagctgggtattaaactgccgctgggtcgtgacggttccgaaccgaaaatgcagcgcctgggcgatatgacggcagttgaaatcaaaggtcgcattcattttgatctgtaccacgtgatccgtcgcaccattaatctgccgacctatacgctggaagcagtttacgaagctatcttcggcaagccgaaagaaaaggtctatgcccatgaaattgcagaagcttgggaaacgggcaagggtctggaacgtgtcgctaaatatagcatggaagatgcgaaggtgacctacgaactgggtcgtgaatttttcccgatggaagcacagctgagccgcctggtcggccaaccgctgtgggatgtgtctcgtagttccaccggtaacctggtggaatggtatctgctgcgtaaagcgtatgaacgcaacgaagtggcaccgaataaaccggatgaacgtgaatatcagcgtcgcctgcgcgaaagttatgcaggcggttacgtgaaagaaccggaaaaaggtctgtgggaaggcctggtttatctggattttcgtgcgctgtacccgagcattatcattacgcataacgtttctccggacaccctgaatcgtgaaggctgccgcgaatatgatattgcgccggaagtgggtcacaaattttgtaaagatatcccgggcttcattccgagcctgctgaaacgtctgctggaagaacgccagaaaatcaaaacgaaaatgaaagaaacccaagatccgatcgaaaaaattctgctggactaccgtcagcgcgcgatcaaaattctggccaacagttattacggttattacggctatgcaaaagctcgctggtactgcaaagaatgtgcagaatccgttaccgcttggggtcgtaaatacatcgaattcgtctggaaagaactggaagaaaaattcggtttcaaagttctgtacatcgatacggacggtctgtacgcaaccatcccgggcggtaaaccggaagaaattaagaaaaaagccctggaatttgtggattacattaatgcaaaactgccgggcctgctggaactggaatatgaaggtttctacgtgcgtggctttttcgttaccaagaaaaaatatgccgtcattgacgaagaaggtaaagtgatcacccgcggcctggaaattgttcgtcgcgattggagtgaaattgccaaagaaacccaggcacgtgttctggaagcaattctgaaacatggtaacgtcgaagaagcggtcaaaatcgtgaaagaagttacggaaaaactgtctaactacgaaattccgccggaaaaactggccatctacgaacaaattacccgcccgctgcatgaatataaagcaatcggtccgcacgtcgcagtggcaaaacgtctggcagcacgcggcgttaaagtcaaaccgggtatggtcatcggctatattgtgctgcgtggtgatggcccgatcagcaaccgcgcaattctggctgaagaatacgatctgaaaaaacacaaatacgacgccgaatattacatcgaaaatcaggttctgccggctgtcctgcgtattctggaagcgtttggctatcgtaaagaagatctgcgctggcagaaaacccgtcaaacgggtctgacctcatggctgaatattaaaaaatcgtaa

SEQ ID NO: 550 - DNA, 2328 bp, Artificial Sequence
  Synthetic
atgatcctggacgcaaactacattaccgaagatggcaaaccgattatccgcattttcaagaaggaaaacggcgaatttaaggtggaatatgaccgtaactttcgcccgtatatttacgctctgctgaaagatgacagccagatcgatgaagtgaaaaagattaccgcggaacgtcatggcaaaatcgttcgcattgttgatgtcgaaaaggtcaaaaagaaatttctgggtcgcccgattgaagtgtggaaactgtatttcgaacatccgcaagatgttccggctatccgtgacaaaattcgcgaacacccggcggtggttgatatctttgaatatgacattccgttcgcgaagcgttacctgatcgataaaggcctgattccgatggaaggtgacgaagaactgaaactgctggcctttgatattgaaacgctgtaccacgaaggcgaagaattcgcaaaaggtccgattatcatgatcagctatgcggacgaagaaggcgccaaagttattacctggaagaaagtcgatctgccgtatgtggaagtcgtgagctctgaacgtgaaatgatcaaacgctttctgaaagtgattcgcgaaaaagatccggacgttattatcacctataacggcgatagtttcgacctgccgtacctggtgaaacgtgccgaaaagctgggtattaaactgccgctgggtcgtgacggttccgaaccgaaaatgcagcgcctgggcgatatgacggcagttgaaatcaaaggtcgcattcattttgatctgtaccacgtgatccgtcgcaccattaatctgccgacctatacgctggaagcagtttacgaagctatcttcggcaagccgaaagaaaaggtctatgcccatgaaattgcagaagcttgggaaacgggcaagggtctggaacgtgtcgctaaatatagcatggaagatgcgaaggtgacctacgaactgggtcgtgaatttttcccgatggaagcacagctgagccgcctggtcggccaaccgctgtgggatgtgtctcgtagttccaccggtaacctggtggaatggtatctgctgcgtaaagcgtatgaacgcaacgaagtggcaccgaataaaccggatgaacgtgaatatcagcgtcgcctgcgcgaaagttatgcaggcggttacgtgaaagaaccggaaaaaggtctgtgggaaggcctggtttatctggattttcgtgcgctgtacccgagcattatcattacgcataacgtttctccggacaccctgaatcgtgaaggctgccgcgaatatgatattgcgccggaagtgggtcacaaattttgtaaagatatcccgggcttcattccgagcctgctgaaacgtctgctggaagaacgccagaaaatcaaaacgaaaatgaaagaaacccaagatccgatcgaaaaaattctgctggactaccgtcagcgcgcgatcaaaattctggccaacagttattacggttattacggctatgcaaaagctcgctggtactgcaaagaatgtgcagaatccgttaccgcttggggtcgtaaatacatcgaattcgtctggaaagaactggaagaaaaattcggtttcaaagttctgtacatcgatacggacggtctgtacgcaaccatcccgggcggtaaaccggaagaaattaagaaaaaagccctggaatttgtggattacattaatgcaaaactgccgggcctgctggaactggaatatgaaggtttctacgtgcgtggctttttcgttaccaagaaaaaatatgccgtcattgacgaagaaggtaaagtgatcacccgcggcctggaaattgttcgtcgcgattggagtgaaattgccaaagaaacccaggcaaaagttctggaagcaatcctgaaacatggtaatgtcgaagaagcagtgaaaattgtcaaggaagtgacggaaaaactgtcgaagtatgaaatcccgccggaaaaactggtgatctacgaacaaattacccgcccgctgcatgaatataaagcgattggcccgcacgtggcagttgctaaacgtctggcagcccgcggtgtcaaagtgcgtccgggcatggtgatcggttatattgttctgcgtggcgatggtccgatcagtaaacgcgcgattctggccgaagaatttgatccgcgcaaacacaagtacgacgccgaatattacatcgaaaaccaggtgctgccggctgttctgcgtattctggaagcgttcggctatcgtaaagaagatctgcgctggcagaaaaccaagcaaacgggtctgaccgcatggctgaatgtgaaaaagaaataa

SEQ ID NO: 551 - DNA, 2328 bp, Artificial Sequence
  Synthetic
atgatcctggacgcaaactacattaccgaagatggcaaaccgattatccgcattttcaagaaggaaaacggcgaatttaaggtggaatatgaccgtaactttcgcccgtatatttacgctctgctgaaagatgacagccagatcgatgaagtgaaaaagattaccgcggaacgtcatggcaaaatcgttcgcattgttgatgtcgaaaaggtcaaaaagaaatttctgggtcgcccgattgaagtgtggaaactgtatttcgaacatccgcaagatgttccggctatccgtgacaaaattcgcgaacacccggcggtggttgatatctttgaatatgacattccgttcgcgaagcgttacctgatcgataaaggcctgattccgatggaaggtgacgaagaactgaaactgctggcctttgatattgaaacgctgtaccacgaaggcgaagaattcgcaaaaggtccgattatcatgatcagctatgcggacgaagaaggcgccaaagttattacctggaagaaagtcgatctgccgtatgtggaagtcgtgagctctgaacgtgaaatgatcaaacgctttctgaaagtgattcgcgaaaaagatccggacgttattatcacctataacggcgatagtttcgacctgccgtacctggtgaaacgtgccgaaaagctgggtattaaactgccgctgggtcgtgacggttccgaaccgaaaatgcagcgcctgggcgatatgacggcagttgaaatcaaaggtcgcattcattttgatctgtaccacgtgatccgtcgcaccattaatctgccgacctatacgctggaagcagtttacgaagctatcttcggcaagccgaaagaaaaggtctatgcccatgaaattgcagaagcttgggaaacgggcaagggtctggaacgtgtcgctaaatatagcatggaagatgcgaaggtgacctacgaactgggtcgtgaatttttcccgatggaagcacagctgagccgcctggtcggccaaccgctgtgggatgtgtctcgtagttccaccggtaacctggtggaatggtatctgctgcgtaaagcgtatgaacgcaacgaactggcgccgaataaaccggatgaaaaggaactggcacgtcgccgtggcggttatgcaggcggttacgtcaaagaaccggaacgtggcctgtgggataatattgtgtatctggactttcgcagtctgtacccgtccattatcattacccataacgttagtccggacacgctgaatcgcgaaggctgcaaagaatatgatgtggccccggaagttggtcacaagttctgtaaagactttccgggcttcatcccgtccctgctgggtgatctgctggaagaacgccagaagattaagcgtaagatgaaagcaaccgttgatccgctggaaaagaaactgctggactatcgccaacgtgcgatcaaaattctggccaacagctattacggctattacggttatgcgaaagcccgctggtactgccgtgaatgtgcagaatctgtgaccgcttggggccgcgaatatattgaaaccacgatccgtgaaatcgaagaaaagttcggtttcaaggttctgtacgctgataccgacggctttttcgcgacgatcccgggtgcagatgctgaaaccgtgaaaaagaaagctaaggaattcctgaagtacatcaacgcgaaactgccgggcctgctggaactggaatatgaaggcttctacgttcgtggctttttcgtcacgaagaaaaagtacgcggttatcgacgaagaaggcaaaattaccacgcgcggtctggaaatcgtgcgccgtgattggagtgaaattgccaaagaaacccaggcacgcgttctggaagcaatcctgcgtcatggtgacgtcgaagaagccgttcgcattgtcaaagatgtgacggaaaagctgtcgaaatatgaagtcccgccggaaaaactggtgatccatgaacaaattacccgtgaactgaaggattacaaagcgacgggcccgcacgttgcaattgctaaacgcctggcagcccgtggcatcaagattcgtccgggtaccgttatcagctatattgtcctgaaaggctctggtcgcatcggtgatcgtgctattccgtttgatgaattcgacccgacgaaacaccgttacgatgccgaatattacatcgaaaatcaggtgctgccggccgttgaacgcattctgaaagcatttggctataagaaagaagaactgcgctaccagaaaacccgtcaagtgggcctgggtgcgtggctgaagctgaaaggtaagaaataa

SEQ ID NO: 552 - DNA, 2322 bp, Artificial Sequence
  Synthetic
atgatcctggacgcaaactacattaccgaagatggcaaaccgattatccgcattttcaagaaggaaaacggcgaatttaaggtggaatatgaccgtaactttcgcccgtatatttacgctctgctgaaagatgacagccagatcgatgaagtgaaaaagattaccgcggaacgtcatggcaaaatcgttcgcattgttgatgtcgaaaaggtcaaaaagaaatttctgggtcgcccgattgaagtgtggaaactgtatttcgaacatccgcaagatgttccggctatccgtgacaaaattcgcgaacacccggcggtggttgatatctttgaatatgacattccgttcgcgaagcgttacctgatcgataaaggcctgattccgatggaaggtgacgaagaactgaaactgctggcctttgatattgaaacgctgtaccacgaaggcgaagaattcgcaaaaggtccgattatcatgatcagctatgcggacgaagaaggcgccaaagttattacctggaagaaagtcgatctgccgtatgtggaagtcgtgagctctgaacgtgaaatgatcaaacgctttctgaaagtgattcgcgaaaaagatccggacgttattatcacctataacggcgatagtttcgacctgccgtacctggtgaaacgtgccgaaaagctgggtattaaactgccgctgggtcgtgacggttccgaaccgaaaatgcagcgcctgggcgatatgacggcagttgaaatcaaaggtcgcattcattttgatctgtaccacgtgatccgtcgcaccattaatctgccgacctatacgctggaagcagtttacgaagctatcttcggcaagccgaaagaaaaggtctatgcccatgaaattgcagaagcttgggaaacgggcaagggtctggaacgtgtcgctaaatatagcatggaagatgcgaaggtgacctacgaactgggtcgtgaatttttcccgatggaagcacagctgagccgcctggtcggccaaccgctgtgggatgtgtctcgtagttccaccggtaacctggtggaatggtatctgctgcgtaaagcgtatgaacgcaacgaactggcgccgaataaaccggatgaaaaggaactggcacgtcgccgtggcggttatgcaggcggttacgtcaaagaaccggaacgtggcctgtgggataatattgtgtatctggactttcgcagtctgtacccgtccattatcattacccataacgttagtccggacacgctgaatcgcgaaggctgcaaagaatatgatgtggccccggaagttggtcacaagttctgtaaagactttccgggcttcatcccgtccctgctgggtgatctgctggaagaacgccagaagattaagcgtaagatgaaagcaaccgttgatccgctggaaaagaaactgctggactatcgccaacgtgcgatcaaaattctggccaacagctattacggctattacggttatgcgaaagcccgctggtactgccgtgaatgtgcagaatctgtgaccgcttggggccgcgaatatattgaaaccacgatccgtgaaatcgaagaaaagttcggtttcaaggttctgtacgctgataccgacggctttttcgcgacgatcccgggtgcagatgctgaaaccgtgaaaaagaaagctaaggaattcctgaagtacatcaacgcgaaactgccgggcctgctggaactggaatatgaaggcttctacgttcgtggctttttcgtcacgaagaaaaagtacgcggttatcgacgaagaaggcaaaattaccacgcgcggtctggaaatcgtgcgccgtgattggagtgaaattgccaaagaaacccaggcacgtgtcctggaagcaatcctgaaacatggtgatgtggaagaagcggttcgcattgtcaaagaagtgacggaaaagctgtcgaaatatgaagttccgccggaaaaactggtcatccatgaacaaattacccgcgatctgcgtgactacaaagccacgggtccgcacgtggcagttgcaaaacgtctggcagcccgtggcgtgaagattcgtccgggtaccgtgatcagttatattgttctgaaaggctccggtcgcatcggtgaccgtgctattccgtttgatgaattcgacccgacgaaacaccgttacgatgccgaatattacatcgaaaatcaggtcctgccggccgtggaacgcattctgaaagcatttggttatcgcaaggaagatctgcgttaccagaagaccaaacaagtcggcctgggtgcgtggctgaaagtgaaaaagtaa

SEQ ID NO: 553 - DNA, 2328 bp, Artificial Sequence
  Synthetic
atgatcctggacgcaaactacattaccgaagatggcaaaccgattatccgcattttcaagaaggaaaacggcgaatttaaggtggaatatgaccgtaactttcgcccgtatatttacgctctgctgaaagatgacagccagatcgatgaagtgaaaaagattaccgcggaacgtcatggcaaaatcgttcgcattgttgatgtcgaaaaggtcaaaaagaaatttctgggtcgcccgattgaagtgtggaaactgtatttcgaacatccgcaagatgttccggctatccgtgacaaaattcgcgaacacccggcggtggttgatatctttgaatatgacattccgttcgcgaagcgttacctgatcgataaaggcctgattccgatggaaggtgacgaagaactgaaactgctggcctttgatattgaaacgctgtaccacgaaggcgaagaattcgcaaaaggtccgattatcatgatcagctatgcggacgaagaaggcgccaaagttattacctggaagaaagtcgatctgccgtatgtggaagtcgtgagctctgaacgtgaaatgatcaaacgctttctgaaagtgattcgcgaaaaagatccggacgttattatcacctataacggcgatagtttcgacctgccgtacctggtgaaacgtgccgaaaagctgggtattaaactgccgctgggtcgtgacggttccgaaccgaaaatgcagcgcctgggcgatatgacggcagttgaaatcaaaggtcgcattcattttgatctgtaccacgtgatccgtcgcaccattaatctgccgacctatacgctggaagcagtttacgaagctatcttcggcaagccgaaagaaaaggtctatgcccatgaaattgcagaagcttgggaaacgggcaagggtctggaacgtgtcgctaaatatagcatggaagatgcgaaggtgacctacgaactgggtcgtgaatttttcccgatggaagcacagctgagccgcctggtcggccaaccgctgtgggatgtgtctcgtagttccaccggtaacctggtggaatggtatctgctgcgtaaagcgtatgaacgcaacgaactggcgccgaataaaccggatgaaaaggaactggcacgtcgccgtggcggttatgcaggcggttacgtcaaagaaccggaacgtggcctgtgggataatattgtgtatctggactttcgcagtctgtacccgtccattatcattacccataacgttagtccggacacgctgaatcgcgaaggctgcaaagaatatgatgtggccccggaagttggtcacaagttctgtaaagactttccgggcttcatcccgtccctgctgggtgatctgctggaagaacgccagaagattaagcgtaagatgaaagcaaccgttgatccgctggaaaagaaactgctggactatcgccaacgtgcgatcaaaattctggccaacagctattacggctattacggttatgcgaaagcccgctggtactgccgtgaatgtgcagaatctgtgaccgcttggggccgcgaatatattgaaaccacgatccgtgaaatcgaagaaaagttcggtttcaaggttctgtacgctgataccgacggctttttcgcgacgatcccgggtgcagatgctgaaaccgtgaaaaagaaagctaaggaattcctgaagtacatcaacgcgaaactgccgggcctgctggaactggaatatgaaggcttctacgttcgtggctttttcgtcacgaagaaaaagtacgcggttatcgacgaagaaggcaaaattaccacgcgcggtctggaaatcgtgcgccgtgattggagtgaaattgccaaagaaacccaggcacgtgtgctggaagctctgctgaaagatggcaatgttgaagaagcggtttccattgtcaaagaagtgacggaaaagctgggtaaatatgaagtcccgccggaaaaactggtgatccatgaacaaattacccgcgaactgaaggattacaaagcgacgggcccgcacgttgctatcgcgaaacgtctggcagcgcgtggcgtgaagattcgtccgggtaccgttatcagctatattgtcctgaaaggctctggtcgtatcggtgaccgcgcgattccgtttgatgaattcgacccgacgaaacatcgctacgatgcagaatattacatcgaaaaccaggttctgccggctgtcgaacgtattctgaaagcgtttggctatcgtgccgaagatctgcgctaccagaaaacccgtcaagtgggcctgggtgtttggctgcaaccgaaaggtaagaaataa

SEQ ID NO: 554 - DNA, 2325 bp, Artificial Sequence
  Synthetic
atgatcctggacgcaaactacattaccgaagatggcaaaccgattatccgcattttcaagaaggaaaacggcgaatttaaggtggaatatgaccgtaactttcgcccgtatatttacgctctgctgaaagatgacagccagatcgatgaagtgaaaaagattaccgcggaacgtcatggcaaaatcgttcgcattgttgatgtcgaaaaggtcaaaaagaaatttctgggtcgcccgattgaagtgtggaaactgtatttcgaacatccgcaagatgttccggctatccgtgacaaaattcgcgaacacccggcggtggttgatatctttgaatatgacattccgttcgcgaagcgttacctgatcgataaaggcctgattccgatggaaggtgacgaagaactgaaactgctggcctttgatattgaaacgctgtaccacgaaggcgaagaattcgcaaaaggtccgattatcatgatcagctatgcggacgaagaaggcgccaaagttattacctggaagaaagtcgatctgccgtatgtggaagtcgtgagctctgaacgtgaaatgatcaaacgctttctgaaagtgattcgcgaaaaagatccggacgttattatcacctataacggcgatagtttcgacctgccgtacctggtgaaacgtgccgaaaagctgggtattaaactgccgctgggtcgtgacggttccgaaccgaaaatgcagcgcctgggcgatatgacggcagttgaaatcaaaggtcgcattcattttgatctgtaccacgtgatccgtcgcaccattaatctgccgacctatacgctggaagcagtttacgaagctatcttcggcaagccgaaagaaaaggtctatgcccatgaaattgcagaagcttgggaaacgggcaagggtctggaacgtgtcgctaaatatagcatggaagatgcgaaggtgacctacgaactgggtcgtgaatttttcccgatggaagcacagctgagccgcctggtcggccaaccgctgtgggatgtgtctcgtagttccaccggtaacctggtggaatggtatctgctgcgtaaagcgtatgaacgcaacgaactggcgccgaataaaccggatgaaaaggaactggcacgtcgccgtggcggttatgcaggcggttacgtcaaagaaccggaacgtggcctgtgggataatattgtgtatctggactttcgcagtctgtacccgtccattatcattacccataacgttagtccggacacgctgaatcgcgaaggctgcaaagaatatgatgtggccccggaagttggtcacaagttctgtaaagactttccgggcttcatcccgtccctgctgggtgatctgctggaagaacgccagaagattaagcgtaagatgaaagcaaccgttgatccgctggaaaagaaactgctggactatcgccaacgtgcgatcaaaattctggccaacagctattacggctattacggttatgcgaaagcccgctggtactgccgtgaatgtgcagaatctgtgaccgcttggggccgcgaatatattgaaaccacgatccgtgaaatcgaagaaaagttcggtttcaaggttctgtacgctgataccgacggctttttcgcgacgatcccgggtgcagatgctgaaaccgtgaaaaagaaagctaaggaattcctgaagtacatcaacgcgaaactgccgggcctgctggaactggaatatgaaggcttctacgttcgtggctttttcgtcacgaagaaaaagtacgcggttatcgacgaagaaggcaaaattaccacgcgcggtctggaaatcgtgcgccgtgattggagtgaaattgccaaagaaacccaggcaaaggttctggaagcaattctgaaacatggtaacgtcgaagaagcggtcaagatcgtgaaagaagttaccgaaaaactgtcgaattatgaaattccggtcgaaaagctggtgatctacgaacaaattacgcgcccgctgaacgaatataaagccattggcccgcacgtggcagttgctaaacgtctggcggccaagggtatcaagattaaaccgggcatggtgattggttatgttgtcctgcgcggcgatggtccgatcagcaaacgtgcgatcgccatcgaagaattcgatggcaaaaagcataagtacgacgcagaatactacatcgaaaatcaggttctgccggccgtcgaacgtatcctgaaagcattcggttataagcgtgaagatctgcgctggcagaagaccaaacaagtgggcctgggtgcgtggctgaaagttaaaaagtcttaa

SEQ ID NO: 555 - DNA, 2328 bp, Artificial Sequence
  Synthetic
atgatcctggacgcaaactacattaccgaagatggcaaaccgattatccgcattttcaagaaggaaaacggcgaatttaaggtggaatatgaccgtaactttcgcccgtatatttacgctctgctgaaagatgacagccagatcgatgaagtgaaaaagattaccgcggaacgtcatggcaaaatcgttcgcattgttgatgtcgaaaaggtcaaaaagaaatttctgggtcgcccgattgaagtgtggaaactgtatttcgaacatccgcaagatgttccggctatccgtgacaaaattcgcgaacacccggcggtggttgatatctttgaatatgacattccgttcgcgaagcgttacctgatcgataaaggcctgattccgatggaaggtgacgaagaactgaaactgctggcctttgatattgaaacgctgtaccacgaaggcgaagaattcgcaaaaggtccgattatcatgatcagctatgcggacgaagaaggcgccaaagttattacctggaagaaagtcgatctgccgtatgtggaagtcgtgagctctgaacgtgaaatgatcaaacgctttctgaaagtgattcgcgaaaaagatccggacgttattatcacctataacggcgatagtttcgacctgccgtacctggtgaaacgtgccgaaaagctgggtattaaactgccgctgggtcgtgacggttccgaaccgaaaatgcagcgcctgggcgatatgacggcagttgaaatcaaaggtcgcattcattttgatctgtaccacgtgatccgtcgcaccattaatctgccgacctatacgctggaagcagtttacgaagctatcttcggcaagccgaaagaaaaggtctatgcccatgaaattgcagaagcttgggaaacgggcaagggtctggaacgtgtcgctaaatatagcatggaagatgcgaaggtgacctacgaactgggtcgtgaatttttcccgatggaagcacagctgagccgcctggtcggccaaccgctgtgggatgtgtctcgtagttccaccggtaacctggtggaatggtatctgctgcgtaaagcgtatgaacgcaacgaactggcgccgaataaaccggatgaaaaggaactggcacgtcgccgtggcggttatgcaggcggttacgtcaaagaaccggaacgtggcctgtgggataatattgtgtatctggactttcgcagtctgtacccgtccattatcattacccataacgttagtccggacacgctgaatcgcgaaggctgcaaagaatatgatgtggccccggaagttggtcacaagttctgtaaagactttccgggcttcatcccgtccctgctgggtgatctgctggaagaacgccagaagattaagcgtaagatgaaagcaaccgttgatccgctggaaaagaaactgctggactatcgccaacgtgcgatcaaaattctggccaacagctattacggctattacggttatgcgaaagcccgctggtactgccgtgaatgtgcagaatctgtgaccgcttggggccgcgaatatattgaaaccacgatccgtgaaatcgaagaaaagttcggtttcaaggttctgtacgctgataccgacggctttttcgcgacgatcccgggtgcagatgctgaaaccgtgaaaaagaaagctaaggaattcctgaagtacatcaacgcgaaactgccgggcctgctggaactggaatatgaaggcttctacgttcgtggctttttcgtcacgaagaaaaagtacgcggttatcgacgaagaaggcaaaattaccacgcgcggtctggaaatcgtgcgccgtgattggagtgaaattgccaaagaaacccaggcacgtgttctggaagcactgctgaaagatggtaatgtcgaagaagcagtgagtattgttaaagaagtcacggaaaaactgtccaagtatgaagtcccgccggaaaaactggtgattcatgaacaaatcacccgcgaactgaaagattacaaggcgacgggcccgcacgtggcaattgctaaacgtctggcagcgcgtggcgttaagatccgtccgggtaccgttattagctatatcgtcctgaaaggctctggtcgtattggtgaccgcgccatcccgtttgatgaattcgacccggctaaacaccgctacgatgcggaatattacattgaaaatcaggtcctgccggctgtggaacgtatcctgaaagcgtttggctatcgtaaggaagatctgcgctaccagaaaacccgtcaagtgggcctgggtgcgtggctgaaaccgaagggtaaaaagtaa

SEQ ID NO: 556 - DNA, 2328 bp, Artificial Sequence
  Synthetic
atgatcctggacgcaaactacattaccgaagatggcaaaccgattatccgcattttcaagaaggaaaacggcgaatttaaggtggaatatgaccgtaactttcgcccgtatatttacgctctgctgaaagatgacagccagatcgatgaagtgaaaaagattaccgcggaacgtcatggcaaaatcgttcgcattgttgatgtcgaaaaggtcaaaaagaaatttctgggtcgcccgattgaagtgtggaaactgtatttcgaacatccgcaagatgttccggctatccgtgacaaaattcgcgaacacccggcggtggttgatatctttgaatatgacattccgttcgcgaagcgttacctgatcgataaaggcctgattccgatggaaggtgacgaagaactgaaactgctggcctttgatattgaaacgctgtaccacgaaggcgaagaattcgcaaaaggtccgattatcatgatcagctatgcggacgaagaaggcgccaaagttattacctggaagaaagtcgatctgccgtatgtggaagtcgtgagctctgaacgtgaaatgatcaaacgctttctgaaagtgattcgcgaaaaagatccggacgttattatcacctataacggcgatagtttcgacctgccgtacctggtgaaacgtgccgaaaagctgggtattaaactgccgctgggtcgtgacggttccgaaccgaaaatgcagcgcctgggcgatatgacggcagttgaaatcaaaggtcgcattcattttgatctgtaccacgtgatccgtcgcaccattaatctgccgacctatacgctggaagcagtttacgaagctatcttcggcaagccgaaagaaaaggtctatgcccatgaaattgcagaagcttgggaaacgggcaagggtctggaacgtgtcgctaaatatagcatggaagatgcgaaggtgacctacgaactgggtcgtgaatttttcccgatggaagcacagctgagccgcctggtcggccaaccgctgtgggatgtgtctcgtagttccaccggtaacctggtggaatggtatctgctgcgtaaagcgtatgaacgcaacgaactggcgccgaataaaccggatgaaaaggaactggcacgtcgccgtggcggttatgcaggcggttacgtcaaagaaccggaacgtggcctgtgggataatattgtgtatctggactttcgcagtctgtacccgtccattatcattacccataacgttagtccggacacgctgaatcgcgaaggctgcaaagaatatgatgtggccccggaagttggtcacaagttctgtaaagactttccgggcttcatcccgtccctgctgggtgatctgctggaagaacgccagaagattaagcgtaagatgaaagcaaccgttgatccgctggaaaagaaactgctggactatcgccaacgtgcgatcaaaattctggccaacagctattacggctattacggttatgcgaaagcccgctggtactgccgtgaatgtgcagaatctgtgaccgcttggggccgcgaatatattgaaaccacgatccgtgaaatcgaagaaaagttcggtttcaaggttctgtacgctgataccgacggctttttcgcgacgatcccgggtgcagatgctgaaaccgtgaaaaagaaagctaaggaattcctgaagtacatcaacgcgaaactgccgggcctgctggaactggaatatgaaggcttctacgttcgtggctttttcgtcacgaagaaaaagtacgcggttatcgacgaagaaggcaaaattaccacgcgcggtctggaaatcgtgcgccgtgattggagtgaaattgccaaagaaacccaggcacgcgtcctggaagcaatcctgaaagatggtgacgtggaagaagccgtccgtattgtgaaagaagttacggaaaaactgtccaaatatgaagttccgccggaaaaactggtcatccatgaacaaattacccgcgaactgaaagattacaaagcgacgggcccgcacgtcgcaatcgctaaacgtctggcggcgcgtggcgtgaaaattcgtccgggtaccgtgatctcatatattgttctgaaaggctcgggtcgtatcggtgaccgcgctattccgtttgatgaattcgacccgaaaaaacacaaatacgatgcggaatactacatcgaaaaccaggttctgccggccgtcgaacgtattctgcgcgcatttggctaccgtaaagaagatctgcgttatcaaaaaaccaaacaagtgggtctgggtgcgtggctgaaaccgaaaggtaaaaaataa

SEQ ID NO: 557 - DNA, 2325 bp, Artificial Sequence
  Synthetic
atgatcctggacgcaaactacattaccgaagatggcaaaccgattatccgcattttcaagaaggaaaacggcgaatttaaggtggaatatgaccgtaactttcgcccgtatatttacgctctgctgaaagatgacagccagatcgatgaagtgaaaaagattaccgcggaacgtcatggcaaaatcgttcgcattgttgatgtcgaaaaggtcaaaaagaaatttctgggtcgcccgattgaagtgtggaaactgtatttcgaacatccgcaagatgttccggctatccgtgacaaaattcgcgaacacccggcggtggttgatatctttgaatatgacattccgttcgcgaagcgttacctgatcgataaaggcctgattccgatggaaggtgacgaagaactgaaactgctggcctttgatattgaaacgctgtaccacgaaggcgaagaattcgcaaaaggtccgattatcatgatcagctatgcggacgaagaaggcgccaaagttattacctggaagaaagtcgatctgccgtatgtggaagtcgtgagctctgaacgtgaaatgatcaaacgctttctgaaagtgattcgcgaaaaagatccggacgttattatcacctataacggcgatagtttcgacctgccgtacctggtgaaacgtgccgaaaagctgggtattaaactgccgctgggtcgtgacggttccgaaccgaaaatgcagcgcctgggcgatatgacggcagttgaaatcaaaggtcgcattcattttgatctgtaccacgtgatccgtcgcaccattaatctgccgacctatacgctggaagcagtttacgaagctatcttcggcaagccgaaagaaaaggtctatgcccatgaaattgcagaagcttgggaaacgggcaagggtctggaacgtgtcgctaaatatagcatggaagatgcgaaggtgacctacgaactgggtcgtgaatttttcccgatggaagcacagctgagccgcctggtcggccaaccgctgtgggatgtgtctcgtagttccaccggtaacctggtggaatggtatctgctgcgtaaagcgtatgaacgcaacgaactggcgccgaataaaccggatgaaaaggaactggcacgtcgccgtggcggttatgcaggcggttacgtcaaagaaccggaacgtggcctgtgggataatattgtgtatctggactttcgcagtctgtacccgtccattatcattacccataacgttagtccggacacgctgaatcgcgaaggctgcaaagaatatgatgtggccccggaagttggtcacaagttctgtaaagactttccgggcttcatcccgtccctgctgggtgatctgctggaagaacgccagaagattaagcgtaagatgaaagcaaccgttgatccgctggaaaagaaactgctggactatcgccaacgtgcgatcaaaattctggccaacagctattacggctattacggttatgcgaaagcccgctggtactgccgtgaatgtgcagaatctgtgaccgcttggggccgcgaatatattgaaaccacgatccgtgaaatcgaagaaaagttcggtttcaaggttctgtacgctgataccgacggctttttcgcgacgatcccgggtgcagatgctgaaaccgtgaaaaagaaagctaaggaattcctgaagtacatcaacgcgaaactgccgggcctgctggaactggaatatgaaggcttctacgttcgtggctttttcgtcacgaagaaaaagtacgcggttatcgacgaagaaggcaaaattaccacgcgcggtctggaaatcgtgcgccgtgattggagtgaaattgccaaagaaacccaggcacgtgttctggaagcaattctgaaacatggtaacgtcgaagaagcggtcaaaatcgtgaaagaagttacggaaaaactgtctaactacgaaattccgccggaaaaactggccatctacgaacaaattacccgcccgctgcatgaatataaagcaatcggtccgcacgtcgcagtggcaaaacgtctggcagcacgcggcgttaaagtcaaaccgggtatggtcatcggctatattgtgctgcgtggtgatggcccgatcagcaaccgcgcaattctggctgaagaatacgatctgaaaaaacacaaatacgacgccgaatattacatcgaaaatcaggttctgccggctgtcctgcgtattctggaagcgtttggctatcgtaaagaagatctgcgctggcagaaaacccgtcaaacgggtctgacctcatggctgaatattaaaaaatcgtaa

SEQ ID NO: 558 - DNA, 2325 bp, Artificial Sequence
  Synthetic
atgatcctggacgcaaactacattaccgaagatggcaaaccgattatccgcattttcaagaaggaaaacggcgaatttaaggtggaatatgaccgtaactttcgcccgtatatttacgctctgctgaaagatgacagccagatcgatgaagtgaaaaagattaccgcggaacgtcatggcaaaatcgttcgcattgttgatgtcgaaaaggtcaaaaagaaatttctgggtcgcccgattgaagtgtggaaactgtatttcgaacatccgcaagatgttccggctatccgtgacaaaattcgcgaacacccggcggtggttgatatctttgaatatgacattccgttcgcgaagcgttacctgatcgataaaggcctgattccgatggaaggtgacgaagaactgaaactgctggcctttgatattgaaacgctgtaccacgaaggcgaagaattcgcaaaaggtccgattatcatgatcagctatgcggacgaagaaggcgccaaagttattacctggaagaaagtcgatctgccgtatgtggaagtcgtgagctctgaacgtgaaatgatcaaacgctttctgaaagtgattcgcgaaaaagatccggacgttattatcacctataacggcgatagtttcgacctgccgtacctggtgaaacgtgccgaaaagctgggtattaaactgccgctgggtcgtgacggttccgaaccgaaaatgcagcgcctgggcgatatgacggcagttgaaatcaaaggtcgcattcattttgatctgtaccacgtgatccgtcgcaccattaatctgccgacctatacgctggaagcagtttacgaagctatcttcggcaagccgaaagaaaaggtctatgcccatgaaattgcagaagcttgggaaacgggcaagggtctggaacgtgtcgctaaatatagcatggaagatgcgaaggtgacctacgaactgggtcgtgaatttttcccgatggaagcacagctgagccgcctggtcggccaaccgctgtgggatgtgtctcgtagttccaccggtaacctggtggaatggtatctgctgcgtaaagcgtatgaacgcaacgaactggcgccgaataaaccggatgaaaaggaactggcacgtcgccgtggcggttatgcaggcggttacgtcaaagaaccggaacgtggcctgtgggataatattgtgtatctggactttcgcagtctgtacccgtccattatcattacccataacgttagtccggacacgctgaatcgcgaaggctgcaaagaatatgatgtggccccggaagttggtcacaagttctgtaaagactttccgggcttcatcccgtccctgctgggtgatctgctggaagaacgccagaagattaagcgtaagatgaaagcaaccgttgatccgctggaaaagaaactgctggactatcgccaacgtgcgatcaaaattctggccaacagctattacggctattacggttatgcgaaagcccgctggtactgccgtgaatgtgcagaatctgtgaccgcttggggccgcgaatatattgaaaccacgatccgtgaaatcgaagaaaagttcggtttcaaggttctgtacgctgataccgacggctttttcgcgacgatcccgggtgcagatgctgaaaccgtgaaaaagaaagctaaggaattcctgaagtacatcaacgcgaaactgccgggcctgctggaactggaatatgaaggcttctacgttcgtggctttttcgtcacgaagaaaaagtacgcggttatcgacgaagaaggcaaaattaccacgcgcggtctggaaatcgtgcgccgtgattggagtgaaattgccaaagaaacccaggcaaaagttctggaagcaatcctgaaacatggtaatgtcgaagaagcagtgaaaattgtcaaggaagtgacggaaaaactgtcgaagtatgaaatcccgccggaaaaactggtgatctacgaacaaattacccgcccgctgcatgaatataaagcgattggcccgcacgtggcagttgctaaacgtctggcagcccgcggtgtcaaagtgcgtccgggcatggtgatcggttatattgttctgcgtggcgatggtccgatcagtaaacgcgcgattctggccgaagaatttgatccgcgcaaacacaagtacgacgccgaatattacatcgaaaaccaggtgctgccggctgttctgcgtattctggaagcgttcggctatcgtaaagaagatctgcgctggcagaaaaccaagcaaacgggtctgaccgcatggctgaatgtgaaaaagaaataa

SEQ ID NO: 559 - DNA, 2328 bp, Artificial Sequence
  Synthetic
atgatcctggacgcaaactacattaccgaagatggcaaaccgattatccgcattttcaagaaggaaaacggcgaatttaaggtggaatatgaccgtaactttcgcccgtatatttacgctctgctgaaagatgacagccagatcgatgaagtgaaaaagattaccgcggaacgtcatggcaaaatcgttcgcattgttgatgtcgaaaaggtcaaaaagaaatttctgggtcgcccgattgaagtgtggaaactgtatttcgaacatccgcaagatgttccggctatccgtgacaaaattcgcgaacacccggcggtggttgatatctttgaatatgacattccgttcgcgaagcgttacctgatcgataaaggcctgattccgatggaaggtgacgaagaactgaaactgctggcctttgatattgaaacgctgtaccacgaaggcgaagaattcgcaaaaggtccgattatcatgatcagctatgcggacgaagaaggcgccaaagttattacctggaagaaagtcgatctgccgtatgtggaagtcgtgagctctgaacgtgaaatgatcaaacgctttctgaaagtgattcgcgaaaaagatccggacgttattatcacctataacggcgatagtttcgacctgccgtacctggtgaaacgtgccgaaaagctgggtattaaactgccgctgggtcgtgacggttccgaaccgaaaatgcagcgcctgggcgatatgacggcagttgaaatcaaaggtcgcattcattttgatctgtaccacgtgatccgtcgcaccattaatctgccgacctatacgctggaagcagtttacgaagctatcttcggcaagccgaaagaaaaggtctatgcccatgaaattgcagaagcttgggaaacgggcaagggtctggaacgtgtcgctaaatatagcatggaagatgcgaaggtgacctacgaactgggtcgtgaatttttcccgatggaagcacagctgagccgcctggtcggccaaccgctgtgggatgtgtctcgtagttccaccggtaacctggtggaatggtatctgctgcgtaaagcgtatgaacgcaacgaaattgcgccgaataaaccggatgaacgtgaactggcacgtcgccgtggcggttatgcaggcggttacgttaaagaaccggaacgcggcctgtgggataatatcgtctatctggactttatgagtctgtacccgtccattatcattacccataacgttagtccggacacgttcaatcgtgaaggctgcaaagaatatgataccgccccgcaggttggtcacaagttttgtaaagacgtccaaggcttcattccgagtctgctgggtgccctgctggatgaacgccagaaaatcaagaaacgtatgaaggcatccattgatccgctggaaaagaaactgctggactatcgccaaaaggcgatcaaaattctggccaactcatattacggctattacggttatgcacgcgctcgttggtactgcaaagaatgtgcagaatcggtgaccgcttggggccgtgattatattgaaaccacgatccacgaaattgaagaacgctttggtttcaaagttctgtacgctgataccgacggctttttcgcgacgatcccgggtgcggatgccgaaaccgtgaagaaaaaggctaaggaattcctgaagtacatcaacgcgaaactgccgggcctgctggaactggaatatgaaggcttctacgtccgtggctttttcgtgaccaaaaagaaatacgcggttatcgacgaagaaggcaaaattaccacgcgcggtctggaaatcgtgcgccgtgattggagtgaaattgccaaagaaacccaggcacgcgttctggaagcaatcctgcgtcatggtgacgtcgaagaagccgttcgcattgtcaaagatgtgacggaaaagctgtcgaaatatgaagtcccgccggaaaaactggtgatccatgaacaaattacccgtgaactgaaggattacaaagcgacgggcccgcacgttgcaattgctaaacgcctggcagcccgtggcatcaagattcgtccgggtaccgttatcagctatattgtcctgaaaggctctggtcgcatcggtgatcgtgctattccgtttgatgaattcgacccgacgaaacaccgttacgatgccgaatattacatcgaaaatcaggtgctgccggccgttgaacgcattctgaaagcatttggctataagaaagaagaactgcgctaccagaaaacccgtcaagtgggcctgggtgcgtggctgaagctgaaaggtaagaaataa

SEQ ID NO: 560 - DNA, 2322 bp, Artificial Sequence
  Synthetic
atgatcctggacgcaaactacattaccgaagatggcaaaccgattatccgcattttcaagaaggaaaacggcgaatttaaggtggaatatgaccgtaactttcgcccgtatatttacgctctgctgaaagatgacagccagatcgatgaagtgaaaaagattaccgcggaacgtcatggcaaaatcgttcgcattgttgatgtcgaaaaggtcaaaaagaaatttctgggtcgcccgattgaagtgtggaaactgtatttcgaacatccgcaagatgttccggctatccgtgacaaaattcgcgaacacccggcggtggttgatatctttgaatatgacattccgttcgcgaagcgttacctgatcgataaaggcctgattccgatggaaggtgacgaagaactgaaactgctggcctttgatattgaaacgctgtaccacgaaggcgaagaattcgcaaaaggtccgattatcatgatcagctatgcggacgaagaaggcgccaaagttattacctggaagaaagtcgatctgccgtatgtggaagtcgtgagctctgaacgtgaaatgatcaaacgctttctgaaagtgattcgcgaaaaagatccggacgttattatcacctataacggcgatagtttcgacctgccgtacctggtgaaacgtgccgaaaagctgggtattaaactgccgctgggtcgtgacggttccgaaccgaaaatgcagcgcctgggcgatatgacggcagttgaaatcaaaggtcgcattcattttgatctgtaccacgtgatccgtcgcaccattaatctgccgacctatacgctggaagcagtttacgaagctatcttcggcaagccgaaagaaaaggtctatgcccatgaaattgcagaagcttgggaaacgggcaagggtctggaacgtgtcgctaaatatagcatggaagatgcgaaggtgacctacgaactgggtcgtgaatttttcccgatggaagcacagctgagccgcctggtcggccaaccgctgtgggatgtgtctcgtagttccaccggtaacctggtggaatggtatctgctgcgtaaagcgtatgaacgcaacgaaattgcgccgaataaaccggatgaacgtgaactggcacgtcgccgtggcggttatgcaggcggttacgttaaagaaccggaacgcggcctgtgggataatatcgtctatctggactttatgagtctgtacccgtccattatcattacccataacgttagtccggacacgttcaatcgtgaaggctgcaaagaatatgataccgccccgcaggttggtcacaagttttgtaaagacgtccaaggcttcattccgagtctgctgggtgccctgctggatgaacgccagaaaatcaagaaacgtatgaaggcatccattgatccgctggaaaagaaactgctggactatcgccaaaaggcgatcaaaattctggccaactcatattacggctattacggttatgcacgcgctcgttggtactgcaaagaatgtgcagaatcggtgaccgcttggggccgtgattatattgaaaccacgatccacgaaattgaagaacgctttggtttcaaagttctgtacgctgataccgacggctttttcgcgacgatcccgggtgcggatgccgaaaccgtgaagaaaaaggctaaggaattcctgaagtacatcaacgcgaaactgccgggcctgctggaactggaatatgaaggcttctacgtccgtggctttttcgtgaccaaaaagaaatacgcggttatcgacgaagaaggcaaaattaccacgcgcggtctggaaatcgtgcgccgtgattggagtgaaattgccaaagaaacccaggcacgtgtcctggaagcaatcctgaaacatggtgatgtggaagaagcggttcgcattgtcaaagaagtgacggaaaagctgtcgaaatatgaagttccgccggaaaaactggtcatccatgaacaaattacccgcgatctgcgtgactacaaagccacgggtccgcacgtggcagttgcaaaacgtctggcagcccgtggcgtgaagattcgtccgggtaccgtgatcagttatattgttctgaaaggctccggtcgcatcggtgaccgtgctattccgtttgatgaattcgacccgacgaaacaccgttacgatgccgaatattacatcgaaaatcaggtcctgccggccgtggaacgcattctgaaagcatttggttatcgcaaggaagatctgcgttaccagaagaccaaacaagtcggcctgggtgcgtggctgaaagtgaaaaagtaa

SEQ ID NO: 561 - DNA, 2328 bp, Artificial Sequence
  Synthetic
atgatcctggacgcaaactacattaccgaagatggcaaaccgattatccgcattttcaagaaggaaaacggcgaatttaaggtggaatatgaccgtaactttcgcccgtatatttacgctctgctgaaagatgacagccagatcgatgaagtgaaaaagattaccgcggaacgtcatggcaaaatcgttcgcattgttgatgtcgaaaaggtcaaaaagaaatttctgggtcgcccgattgaagtgtggaaactgtatttcgaacatccgcaagatgttccggctatccgtgacaaaattcgcgaacacccggcggtggttgatatctttgaatatgacattccgttcgcgaagcgttacctgatcgataaaggcctgattccgatggaaggtgacgaagaactgaaactgctggcctttgatattgaaacgctgtaccacgaaggcgaagaattcgcaaaaggtccgattatcatgatcagctatgcggacgaagaaggcgccaaagttattacctggaagaaagtcgatctgccgtatgtggaagtcgtgagctctgaacgtgaaatgatcaaacgctttctgaaagtgattcgcgaaaaagatccggacgttattatcacctataacggcgatagtttcgacctgccgtacctggtgaaacgtgccgaaaagctgggtattaaactgccgctgggtcgtgacggttccgaaccgaaaatgcagcgcctgggcgatatgacggcagttgaaatcaaaggtcgcattcattttgatctgtaccacgtgatccgtcgcaccattaatctgccgacctatacgctggaagcagtttacgaagctatcttcggcaagccgaaagaaaaggtctatgcccatgaaattgcagaagcttgggaaacgggcaagggtctggaacgtgtcgctaaatatagcatggaagatgcgaaggtgacctacgaactgggtcgtgaatttttcccgatggaagcacagctgagccgcctggtcggccaaccgctgtgggatgtgtctcgtagttccaccggtaacctggtggaatggtatctgctgcgtaaagcgtatgaacgcaacgaaattgcgccgaataaaccggatgaacgtgaactggcacgtcgccgtggcggttatgcaggcggttacgttaaagaaccggaacgcggcctgtgggataatatcgtctatctggactttatgagtctgtacccgtccattatcattacccataacgttagtccggacacgttcaatcgtgaaggctgcaaagaatatgataccgccccgcaggttggtcacaagttttgtaaagacgtccaaggcttcattccgagtctgctgggtgccctgctggatgaacgccagaaaatcaagaaacgtatgaaggcatccattgatccgctggaaaagaaactgctggactatcgccaaaaggcgatcaaaattctggccaactcatattacggctattacggttatgcacgcgctcgttggtactgcaaagaatgtgcagaatcggtgaccgcttggggccgtgattatattgaaaccacgatccacgaaattgaagaacgctttggtttcaaagttctgtacgctgataccgacggctttttcgcgacgatcccgggtgcggatgccgaaaccgtgaagaaaaaggctaaggaattcctgaagtacatcaacgcgaaactgccgggcctgctggaactggaatatgaaggcttctacgtccgtggctttttcgtgaccaaaaagaaatacgcggttatcgacgaagaaggcaaaattaccacgcgcggtctggaaatcgtgcgccgtgattggagtgaaattgccaaagaaacccaggcacgtgtgctggaagctctgctgaaagatggcaatgttgaagaagcggtttccattgtcaaagaagtgacggaaaagctgggtaaatatgaagtcccgccggaaaaactggtgatccatgaacaaattacccgcgaactgaaggattacaaagcgacgggcccgcacgttgctatcgcgaaacgtctggcagcgcgtggcgtgaagattcgtccgggtaccgttatcagctatattgtcctgaaaggctctggtcgtatcggtgaccgcgcgattccgtttgatgaattcgacccgacgaaacatcgctacgatgcagaatattacatcgaaaaccaggttctgccggctgtcgaacgtattctgaaagcgtttggctatcgtgccgaagatctgcgctaccagaaaacccgtcaagtgggcctgggtgtttggctgcaaccgaaaggtaagaaataa

SEQ ID NO: 562 - DNA, 2325 bp, Artificial Sequence
  Synthetic
atgatcctggacgcaaactacattaccgaagatggcaaaccgattatccgcattttcaagaaggaaaacggcgaatttaaggtggaatatgaccgtaactttcgcccgtatatttacgctctgctgaaagatgacagccagatcgatgaagtgaaaaagattaccgcggaacgtcatggcaaaatcgttcgcattgttgatgtcgaaaaggtcaaaaagaaatttctgggtcgcccgattgaagtgtggaaactgtatttcgaacatccgcaagatgttccggctatccgtgacaaaattcgcgaacacccggcggtggttgatatctttgaatatgacattccgttcgcgaagcgttacctgatcgataaaggcctgattccgatggaaggtgacgaagaactgaaactgctggcctttgatattgaaacgctgtaccacgaaggcgaagaattcgcaaaaggtccgattatcatgatcagctatgcggacgaagaaggcgccaaagttattacctggaagaaagtcgatctgccgtatgtggaagtcgtgagctctgaacgtgaaatgatcaaacgctttctgaaagtgattcgcgaaaaagatccggacgttattatcacctataacggcgatagtttcgacctgccgtacctggtgaaacgtgccgaaaagctgggtattaaactgccgctgggtcgtgacggttccgaaccgaaaatgcagcgcctgggcgatatgacggcagttgaaatcaaaggtcgcattcattttgatctgtaccacgtgatccgtcgcaccattaatctgccgacctatacgctggaagcagtttacgaagctatcttcggcaagccgaaagaaaaggtctatgcccatgaaattgcagaagcttgggaaacgggcaagggtctggaacgtgtcgctaaatatagcatggaagatgcgaaggtgacctacgaactgggtcgtgaatttttcccgatggaagcacagctgagccgcctggtcggccaaccgctgtgggatgtgtctcgtagttccaccggtaacctggtggaatggtatctgctgcgtaaagcgtatgaacgcaacgaaattgcgccgaataaaccggatgaacgtgaactggcacgtcgccgtggcggttatgcaggcggttacgttaaagaaccggaacgcggcctgtgggataatatcgtctatctggactttatgagtctgtacccgtccattatcattacccataacgttagtccggacacgttcaatcgtgaaggctgcaaagaatatgataccgccccgcaggttggtcacaagttttgtaaagacgtccaaggcttcattccgagtctgctgggtgccctgctggatgaacgccagaaaatcaagaaacgtatgaaggcatccattgatccgctggaaaagaaactgctggactatcgccaaaaggcgatcaaaattctggccaactcatattacggctattacggttatgcacgcgctcgttggtactgcaaagaatgtgcagaatcggtgaccgcttggggccgtgattatattgaaaccacgatccacgaaattgaagaacgctttggtttcaaagttctgtacgctgataccgacggctttttcgcgacgatcccgggtgcggatgccgaaaccgtgaagaaaaaggctaaggaattcctgaagtacatcaacgcgaaactgccgggcctgctggaactggaatatgaaggcttctacgtccgtggctttttcgtgaccaaaaagaaatacgcggttatcgacgaagaaggcaaaattaccacgcgcggtctggaaatcgtgcgccgtgattggagtgaaattgccaaagaaacccaggcaaaggttctggaagcaattctgaaacatggtaacgtcgaagaagcggtcaagatcgtgaaagaagttaccgaaaaactgtcgaattatgaaattccggtcgaaaagctggtgatctacgaacaaattacgcgcccgctgaacgaatataaagccattggcccgcacgtggcagttgctaaacgtctggcggccaagggtatcaagattaaaccgggcatggtgattggttatgttgtcctgcgcggcgatggtccgatcagcaaacgtgcgatcgccatcgaagaattcgatggcaaaaagcataagtacgacgcagaatactacatcgaaaatcaggttctgccggccgtcgaacgtatcctgaaagcattcggttataagcgtgaagatctgcgctggcagaagaccaaacaagtgggcctgggtgcgtggctgaaagttaaaaagtcttaa

SEQ ID NO: 563 - DNA, 2328 bp, Artificial Sequence
  Synthetic
atgatcctggacgcaaactacattaccgaagatggcaaaccgattatccgcattttcaagaaggaaaacggcgaatttaaggtggaatatgaccgtaactttcgcccgtatatttacgctctgctgaaagatgacagccagatcgatgaagtgaaaaagattaccgcggaacgtcatggcaaaatcgttcgcattgttgatgtcgaaaaggtcaaaaagaaatttctgggtcgcccgattgaagtgtggaaactgtatttcgaacatccgcaagatgttccggctatccgtgacaaaattcgcgaacacccggcggtggttgatatctttgaatatgacattccgttcgcgaagcgttacctgatcgataaaggcctgattccgatggaaggtgacgaagaactgaaactgctggcctttgatattgaaacgctgtaccacgaaggcgaagaattcgcaaaaggtccgattatcatgatcagctatgcggacgaagaaggcgccaaagttattacctggaagaaagtcgatctgccgtatgtggaagtcgtgagctctgaacgtgaaatgatcaaacgctttctgaaagtgattcgcgaaaaagatccggacgttattatcacctataacggcgatagtttcgacctgccgtacctggtgaaacgtgccgaaaagctgggtattaaactgccgctgggtcgtgacggttccgaaccgaaaatgcagcgcctgggcgatatgacggcagttgaaatcaaaggtcgcattcattttgatctgtaccacgtgatccgtcgcaccattaatctgccgacctatacgctggaagcagtttacgaagctatcttcggcaagccgaaagaaaaggtctatgcccatgaaattgcagaagcttgggaaacgggcaagggtctggaacgtgtcgctaaatatagcatggaagatgcgaaggtgacctacgaactgggtcgtgaatttttcccgatggaagcacagctgagccgcctggtcggccaaccgctgtgggatgtgtctcgtagttccaccggtaacctggtggaatggtatctgctgcgtaaagcgtatgaacgcaacgaaattgcgccgaataaaccggatgaacgtgaactggcacgtcgccgtggcggttatgcaggcggttacgttaaagaaccggaacgcggcctgtgggataatatcgtctatctggactttatgagtctgtacccgtccattatcattacccataacgttagtccggacacgttcaatcgtgaaggctgcaaagaatatgataccgccccgcaggttggtcacaagttttgtaaagacgtccaaggcttcattccgagtctgctgggtgccctgctggatgaacgccagaaaatcaagaaacgtatgaaggcatccattgatccgctggaaaagaaactgctggactatcgccaaaaggcgatcaaaattctggccaactcatattacggctattacggttatgcacgcgctcgttggtactgcaaagaatgtgcagaatcggtgaccgcttggggccgtgattatattgaaaccacgatccacgaaattgaagaacgctttggtttcaaagttctgtacgctgataccgacggctttttcgcgacgatcccgggtgcggatgccgaaaccgtgaagaaaaaggctaaggaattcctgaagtacatcaacgcgaaactgccgggcctgctggaactggaatatgaaggcttctacgtccgtggctttttcgtgaccaaaaagaaatacgcggttatcgacgaagaaggcaaaattaccacgcgcggtctggaaatcgtgcgccgtgattggagtgaaattgccaaagaaacccaggcacgtgttctggaagcactgctgaaagatggtaatgtcgaagaagcagtgagtattgttaaagaagtcacggaaaaactgtccaagtatgaagtcccgccggaaaaactggtgattcatgaacaaatcacccgcgaactgaaagattacaaggcgacgggcccgcacgtggcaattgctaaacgtctggcagcgcgtggcgttaagatccgtccgggtaccgttattagctatatcgtcctgaaaggctctggtcgtattggtgaccgcgccatcccgtttgatgaattcgacccggctaaacaccgctacgatgcggaatattacattgaaaatcaggtcctgccggctgtggaacgtatcctgaaagcgtttggctatcgtaaggaagatctgcgctaccagaaaacccgtcaagtgggcctgggtgcgtggctgaaaccgaagggtaaaaagtaa

SEQ ID NO: 564 - DNA, 2328 bp, Artificial Sequence
  Synthetic
atgatcctggacgcaaactacattaccgaagatggcaaaccgattatccgcattttcaagaaggaaaacggcgaatttaaggtggaatatgaccgtaactttcgcccgtatatttacgctctgctgaaagatgacagccagatcgatgaagtgaaaaagattaccgcggaacgtcatggcaaaatcgttcgcattgttgatgtcgaaaaggtcaaaaagaaatttctgggtcgcccgattgaagtgtggaaactgtatttcgaacatccgcaagatgttccggctatccgtgacaaaattcgcgaacacccggcggtggttgatatctttgaatatgacattccgttcgcgaagcgttacctgatcgataaaggcctgattccgatggaaggtgacgaagaactgaaactgctggcctttgatattgaaacgctgtaccacgaaggcgaagaattcgcaaaaggtccgattatcatgatcagctatgcggacgaagaaggcgccaaagttattacctggaagaaagtcgatctgccgtatgtggaagtcgtgagctctgaacgtgaaatgatcaaacgctttctgaaagtgattcgcgaaaaagatccggacgttattatcacctataacggcgatagtttcgacctgccgtacctggtgaaacgtgccgaaaagctgggtattaaactgccgctgggtcgtgacggttccgaaccgaaaatgcagcgcctgggcgatatgacggcagttgaaatcaaaggtcgcattcattttgatctgtaccacgtgatccgtcgcaccattaatctgccgacctatacgctggaagcagtttacgaagctatcttcggcaagccgaaagaaaaggtctatgcccatgaaattgcagaagcttgggaaacgggcaagggtctggaacgtgtcgctaaatatagcatggaagatgcgaaggtgacctacgaactgggtcgtgaatttttcccgatggaagcacagctgagccgcctggtcggccaaccgctgtgggatgtgtctcgtagttccaccggtaacctggtggaatggtatctgctgcgtaaagcgtatgaacgcaacgaaattgcgccgaataaaccggatgaacgtgaactggcacgtcgccgtggcggttatgcaggcggttacgttaaagaaccggaacgcggcctgtgggataatatcgtctatctggactttatgagtctgtacccgtccattatcattacccataacgttagtccggacacgttcaatcgtgaaggctgcaaagaatatgataccgccccgcaggttggtcacaagttttgtaaagacgtccaaggcttcattccgagtctgctgggtgccctgctggatgaacgccagaaaatcaagaaacgtatgaaggcatccattgatccgctggaaaagaaactgctggactatcgccaaaaggcgatcaaaattctggccaactcatattacggctattacggttatgcacgcgctcgttggtactgcaaagaatgtgcagaatcggtgaccgcttggggccgtgattatattgaaaccacgatccacgaaattgaagaacgctttggtttcaaagttctgtacgctgataccgacggctttttcgcgacgatcccgggtgcggatgccgaaaccgtgaagaaaaaggctaaggaattcctgaagtacatcaacgcgaaactgccgggcctgctggaactggaatatgaaggcttctacgtccgtggctttttcgtgaccaaaaagaaatacgcggttatcgacgaagaaggcaaaattaccacgcgcggtctggaaatcgtgcgccgtgattggagtgaaattgccaaagaaacccaggcacgcgtcctggaagcaatcctgaaagatggtgacgtggaagaagccgtccgtattgtgaaagaagttacggaaaaactgtccaaatatgaagttccgccggaaaaactggtcatccatgaacaaattacccgcgaactgaaagattacaaagcgacgggcccgcacgtcgcaatcgctaaacgtctggcggcgcgtggcgtgaaaattcgtccgggtaccgtgatctcatatattgttctgaaaggctcgggtcgtatcggtgaccgcgctattccgtttgatgaattcgacccgaaaaaacacaaatacgatgcggaatactacatcgaaaaccaggttctgccggccgtcgaacgtattctgcgcgcatttggctaccgtaaagaagatctgcgttatcaaaaaaccaaacaagtgggtctgggtgcgtggctgaaaccgaaaggtaaaaaataa

SEQ ID NO: 565 - DNA, 2325 bp, Artificial Sequence
  Synthetic
atgatcctggacgcaaactacattaccgaagatggcaaaccgattatccgcattttcaagaaggaaaacggcgaatttaaggtggaatatgaccgtaactttcgcccgtatatttacgctctgctgaaagatgacagccagatcgatgaagtgaaaaagattaccgcggaacgtcatggcaaaatcgttcgcattgttgatgtcgaaaaggtcaaaaagaaatttctgggtcgcccgattgaagtgtggaaactgtatttcgaacatccgcaagatgttccggctatccgtgacaaaattcgcgaacacccggcggtggttgatatctttgaatatgacattccgttcgcgaagcgttacctgatcgataaaggcctgattccgatggaaggtgacgaagaactgaaactgctggcctttgatattgaaacgctgtaccacgaaggcgaagaattcgcaaaaggtccgattatcatgatcagctatgcggacgaagaaggcgccaaagttattacctggaagaaagtcgatctgccgtatgtggaagtcgtgagctctgaacgtgaaatgatcaaacgctttctgaaagtgattcgcgaaaaagatccggacgttattatcacctataacggcgatagtttcgacctgccgtacctggtgaaacgtgccgaaaagctgggtattaaactgccgctgggtcgtgacggttccgaaccgaaaatgcagcgcctgggcgatatgacggcagttgaaatcaaaggtcgcattcattttgatctgtaccacgtgatccgtcgcaccattaatctgccgacctatacgctggaagcagtttacgaagctatcttcggcaagccgaaagaaaaggtctatgcccatgaaattgcagaagcttgggaaacgggcaagggtctggaacgtgtcgctaaatatagcatggaagatgcgaaggtgacctacgaactgggtcgtgaatttttcccgatggaagcacagctgagccgcctggtcggccaaccgctgtgggatgtgtctcgtagttccaccggtaacctggtggaatggtatctgctgcgtaaagcgtatgaacgcaacgaaattgcgccgaataaaccggatgaacgtgaactggcacgtcgccgtggcggttatgcaggcggttacgttaaagaaccggaacgcggcctgtgggataatatcgtctatctggactttatgagtctgtacccgtccattatcattacccataacgttagtccggacacgttcaatcgtgaaggctgcaaagaatatgataccgccccgcaggttggtcacaagttttgtaaagacgtccaaggcttcattccgagtctgctgggtgccctgctggatgaacgccagaaaatcaagaaacgtatgaaggcatccattgatccgctggaaaagaaactgctggactatcgccaaaaggcgatcaaaattctggccaactcatattacggctattacggttatgcacgcgctcgttggtactgcaaagaatgtgcagaatcggtgaccgcttggggccgtgattatattgaaaccacgatccacgaaattgaagaacgctttggtttcaaagttctgtacgctgataccgacggctttttcgcgacgatcccgggtgcggatgccgaaaccgtgaagaaaaaggctaaggaattcctgaagtacatcaacgcgaaactgccgggcctgctggaactggaatatgaaggcttctacgtccgtggctttttcgtgaccaaaaagaaatacgcggttatcgacgaagaaggcaaaattaccacgcgcggtctggaaatcgtgcgccgtgattggagtgaaattgccaaagaaacccaggcacgtgttctggaagcaattctgaaacatggtaacgtcgaagaagcggtcaaaatcgtgaaagaagttacggaaaaactgtctaactacgaaattccgccggaaaaactggccatctacgaacaaattacccgcccgctgcatgaatataaagcaatcggtccgcacgtcgcagtggcaaaacgtctggcagcacgcggcgttaaagtcaaaccgggtatggtcatcggctatattgtgctgcgtggtgatggcccgatcagcaaccgcgcaattctggctgaagaatacgatctgaaaaaacacaaatacgacgccgaatattacatcgaaaatcaggttctgccggctgtcctgcgtattctggaagcgtttggctatcgtaaagaagatctgcgctggcagaaaacccgtcaaacgggtctgacctcatggctgaatattaaaaaatcgtaa

SEQ ID NO: 566 - DNA, 2325 bp, Artificial Sequence
  Synthetic
atgatcctggacgcaaactacattaccgaagatggcaaaccgattatccgcattttcaagaaggaaaacggcgaatttaaggtggaatatgaccgtaactttcgcccgtatatttacgctctgctgaaagatgacagccagatcgatgaagtgaaaaagattaccgcggaacgtcatggcaaaatcgttcgcattgttgatgtcgaaaaggtcaaaaagaaatttctgggtcgcccgattgaagtgtggaaactgtatttcgaacatccgcaagatgttccggctatccgtgacaaaattcgcgaacacccggcggtggttgatatctttgaatatgacattccgttcgcgaagcgttacctgatcgataaaggcctgattccgatggaaggtgacgaagaactgaaactgctggcctttgatattgaaacgctgtaccacgaaggcgaagaattcgcaaaaggtccgattatcatgatcagctatgcggacgaagaaggcgccaaagttattacctggaagaaagtcgatctgccgtatgtggaagtcgtgagctctgaacgtgaaatgatcaaacgctttctgaaagtgattcgcgaaaaagatccggacgttattatcacctataacggcgatagtttcgacctgccgtacctggtgaaacgtgccgaaaagctgggtattaaactgccgctgggtcgtgacggttccgaaccgaaaatgcagcgcctgggcgatatgacggcagttgaaatcaaaggtcgcattcattttgatctgtaccacgtgatccgtcgcaccattaatctgccgacctatacgctggaagcagtttacgaagctatcttcggcaagccgaaagaaaaggtctatgcccatgaaattgcagaagcttgggaaacgggcaagggtctggaacgtgtcgctaaatatagcatggaagatgcgaaggtgacctacgaactgggtcgtgaatttttcccgatggaagcacagctgagccgcctggtcggccaaccgctgtgggatgtgtctcgtagttccaccggtaacctggtggaatggtatctgctgcgtaaagcgtatgaacgcaacgaaattgcgccgaataaaccggatgaacgtgaactggcacgtcgccgtggcggttatgcaggcggttacgttaaagaaccggaacgcggcctgtgggataatatcgtctatctggactttatgagtctgtacccgtccattatcattacccataacgttagtccggacacgttcaatcgtgaaggctgcaaagaatatgataccgccccgcaggttggtcacaagttttgtaaagacgtccaaggcttcattccgagtctgctgggtgccctgctggatgaacgccagaaaatcaagaaacgtatgaaggcatccattgatccgctggaaaagaaactgctggactatcgccaaaaggcgatcaaaattctggccaactcatattacggctattacggttatgcacgcgctcgttggtactgcaaagaatgtgcagaatcggtgaccgcttggggccgtgattatattgaaaccacgatccacgaaattgaagaacgctttggtttcaaagttctgtacgctgataccgacggctttttcgcgacgatcccgggtgcggatgccgaaaccgtgaagaaaaaggctaaggaattcctgaagtacatcaacgcgaaactgccgggcctgctggaactggaatatgaaggcttctacgtccgtggctttttcgtgaccaaaaagaaatacgcggttatcgacgaagaaggcaaaattaccacgcgcggtctggaaatcgtgcgccgtgattggagtgaaattgccaaagaaacccaggcaaaagttctggaagcaatcctgaaacatggtaatgtcgaagaagcagtgaaaattgtcaaggaagtgacggaaaaactgtcgaagtatgaaatcccgccggaaaaactggtgatctacgaacaaattacccgcccgctgcatgaatataaagcgattggcccgcacgtggcagttgctaaacgtctggcagcccgcggtgtcaaagtgcgtccgggcatggtgatcggttatattgttctgcgtggcgatggtccgatcagtaaacgcgcgattctggccgaagaatttgatccgcgcaaacacaagtacgacgccgaatattacatcgaaaaccaggtgctgccggctgttctgcgtattctggaagcgttcggctatcgtaaagaagatctgcgctggcagaaaaccaagcaaacgggtctgaccgcatggctgaatgtgaaaaagaaataa

SEQ ID NO: 567 - DNA, 2328 bp, Artificial Sequence
  Synthetic
atgatcctggacgcaaactacattaccgaagatggcaaaccgattatccgcattttcaagaaggaaaacggcgaatttaaggtggaatatgaccgtaactttcgcccgtatatttacgctctgctgaaagatgacagccagatcgatgaagtgaaaaagattaccgcggaacgtcatggcaaaatcgttcgcattgttgatgtcgaaaaggtcaaaaagaaatttctgggtcgcccgattgaagtgtggaaactgtatttcgaacatccgcaagatgttccggctatccgtgacaaaattcgcgaacacccggcggtggttgatatctttgaatatgacattccgttcgcgaagcgttacctgatcgataaaggcctgattccgatggaaggtgacgaagaactgaaactgctggcctttgatattgaaacgctgtaccacgaaggcgaagaattcgcaaaaggtccgattatcatgatcagctatgcggacgaagaaggcgccaaagttattacctggaagaaagtcgatctgccgtatgtggaagtcgtgagctctgaacgtgaaatgatcaaacgctttctgaaagtgattcgcgaaaaagatccggacgttattatcacctataacggcgatagtttcgacctgccgtacctggtgaaacgtgccgaaaagctgggtattaaactgccgctgggtcgtgacggttccgaaccgaaaatgcagcgcctgggcgatatgacggcagttgaaatcaaaggtcgcattcattttgatctgtaccacgtgatccgtcgcaccattaatctgccgacctatacgctggaagcagtttacgaagctatcttcggcaagccgaaagaaaaggtctatgcccatgaaattgcagaagcttgggaaacgggcaagggtctggaacgtgtcgctaaatatagcatggaagatgcgaaggtgacctacgaactgggtcgtgaatttttcccgatggaagcacagctgagccgcctggtcggccaaccgctgtgggatgtgtctcgtagttccaccggtaacctggtggaatggtatctgctgcgtaaagcgtatgaacgcaacgaactggctccgaataagccggatgaacgcgaactggttcgtcgccgtaacagctataccggcggttacgtcaaagaaccggaacgcggcctgtgggataatatcgtttatctggactttcgtagtctgtacccgtccattatcattacccataacgtgtcaccggacacgctgaatcgtgaaggctgcaaagaatatgatgaagccccgcaagtgggtcacaagttctgtaaagactttccgggcttcattccgtcgctgctgggtaacctgctggatgaacgccagaaaatcaagaaacgtatgaaggcaaccattgatccgctggaaaagaaactgctggactatcgtcaacgcgctatcaaaattctggcgaattcttattacggctattacgcgtatgcgcgtgcgcgctggtactgcaaagaatgtgccgaaagtgtgaccgcatggggccgcgaatatattgaaatgtccatccgtgaaatcgaagaaaagtacggtttcaaggttctgtacgcggataccgacggtttccacgcaacgatcccgggtgccgatgcagaaaccgtgaagaaaaaggcgatggaattcctgaagtacatcaacgctaagctgccgggtgcgctggaactggaatatgaaggcttctacaaacgtggctttttcgtgacgaaaaagaaatacgccgttatcgacgaagaaggcaaaattaccacgcgcggtctggaaatcgtgcgccgtgattggagtgaaattgccaaagaaacccaggcacgcgttctggaagcaatcctgcgtcatggtgacgtcgaagaagccgttcgcattgtcaaagatgtgacggaaaagctgtcgaaatatgaagtcccgccggaaaaactggtgatccatgaacaaattacccgtgaactgaaggattacaaagcgacgggcccgcacgttgcaattgctaaacgcctggcagcccgtggcatcaagattcgtccgggtaccgttatcagctatattgtcctgaaaggctctggtcgcatcggtgatcgtgctattccgtttgatgaattcgacccgacgaaacaccgttacgatgccgaatattacatcgaaaatcaggtgctgccggccgttgaacgcattctgaaagcatttggctataagaaagaagaactgcgctaccagaaaacccgtcaagtgggcctgggtgcgtggctgaagctgaaaggtaagaaataa

SEQ ID NO: 568 - DNA, 2322 bp, Artificial Sequence
  Synthetic
atgatcctggacgcaaactacattaccgaagatggcaaaccgattatccgcattttcaagaaggaaaacggcgaatttaaggtggaatatgaccgtaactttcgcccgtatatttacgctctgctgaaagatgacagccagatcgatgaagtgaaaaagattaccgcggaacgtcatggcaaaatcgttcgcattgttgatgtcgaaaaggtcaaaaagaaatttctgggtcgcccgattgaagtgtggaaactgtatttcgaacatccgcaagatgttccggctatccgtgacaaaattcgcgaacacccggcggtggttgatatctttgaatatgacattccgttcgcgaagcgttacctgatcgataaaggcctgattccgatggaaggtgacgaagaactgaaactgctggcctttgatattgaaacgctgtaccacgaaggcgaagaattcgcaaaaggtccgattatcatgatcagctatgcggacgaagaaggcgccaaagttattacctggaagaaagtcgatctgccgtatgtggaagtcgtgagctctgaacgtgaaatgatcaaacgctttctgaaagtgattcgcgaaaaagatccggacgttattatcacctataacggcgatagtttcgacctgccgtacctggtgaaacgtgccgaaaagctgggtattaaactgccgctgggtcgtgacggttccgaaccgaaaatgcagcgcctgggcgatatgacggcagttgaaatcaaaggtcgcattcattttgatctgtaccacgtgatccgtcgcaccattaatctgccgacctatacgctggaagcagtttacgaagctatcttcggcaagccgaaagaaaaggtctatgcccatgaaattgcagaagcttgggaaacgggcaagggtctggaacgtgtcgctaaatatagcatggaagatgcgaaggtgacctacgaactgggtcgtgaatttttcccgatggaagcacagctgagccgcctggtcggccaaccgctgtgggatgtgtctcgtagttccaccggtaacctggtggaatggtatctgctgcgtaaagcgtatgaacgcaacgaactggctccgaataagccggatgaacgcgaactggttcgtcgccgtaacagctataccggcggttacgtcaaagaaccggaacgcggcctgtgggataatatcgtttatctggactttcgtagtctgtacccgtccattatcattacccataacgtgtcaccggacacgctgaatcgtgaaggctgcaaagaatatgatgaagccccgcaagtgggtcacaagttctgtaaagactttccgggcttcattccgtcgctgctgggtaacctgctggatgaacgccagaaaatcaagaaacgtatgaaggcaaccattgatccgctggaaaagaaactgctggactatcgtcaacgcgctatcaaaattctggcgaattcttattacggctattacgcgtatgcgcgtgcgcgctggtactgcaaagaatgtgccgaaagtgtgaccgcatggggccgcgaatatattgaaatgtccatccgtgaaatcgaagaaaagtacggtttcaaggttctgtacgcggataccgacggtttccacgcaacgatcccgggtgccgatgcagaaaccgtgaagaaaaaggcgatggaattcctgaagtacatcaacgctaagctgccgggtgcgctggaactggaatatgaaggcttctacaaacgtggctttttcgtgacgaaaaagaaatacgccgttatcgacgaagaaggcaaaattaccacgcgcggtctggaaatcgtgcgccgtgattggagtgaaattgccaaagaaacccaggcacgtgtcctggaagcaatcctgaaacatggtgatgtggaagaagcggttcgcattgtcaaagaagtgacggaaaagctgtcgaaatatgaagttccgccggaaaaactggtcatccatgaacaaattacccgcgatctgcgtgactacaaagccacgggtccgcacgtggcagttgcaaaacgtctggcagcccgtggcgtgaagattcgtccgggtaccgtgatcagttatattgttctgaaaggctccggtcgcatcggtgaccgtgctattccgtttgatgaattcgacccgacgaaacaccgttacgatgccgaatattacatcgaaaatcaggtcctgccggccgtggaacgcattctgaaagcatttggttatcgcaaggaagatctgcgttaccagaagaccaaacaagtcggcctgggtgcgtggctgaaagtgaaaaagtaa

SEQ ID NO: 569 - DNA, 2328 bp, Artificial Sequence
  Synthetic
atgatcctggacgcaaactacattaccgaagatggcaaaccgattatccgcattttcaagaaggaaaacggcgaatttaaggtggaatatgaccgtaactttcgcccgtatatttacgctctgctgaaagatgacagccagatcgatgaagtgaaaaagattaccgcggaacgtcatggcaaaatcgttcgcattgttgatgtcgaaaaggtcaaaaagaaatttctgggtcgcccgattgaagtgtggaaactgtatttcgaacatccgcaagatgttccggctatccgtgacaaaattcgcgaacacccggcggtggttgatatctttgaatatgacattccgttcgcgaagcgttacctgatcgataaaggcctgattccgatggaaggtgacgaagaactgaaactgctggcctttgatattgaaacgctgtaccacgaaggcgaagaattcgcaaaaggtccgattatcatgatcagctatgcggacgaagaaggcgccaaagttattacctggaagaaagtcgatctgccgtatgtggaagtcgtgagctctgaacgtgaaatgatcaaacgctttctgaaagtgattcgcgaaaaagatccggacgttattatcacctataacggcgatagtttcgacctgccgtacctggtgaaacgtgccgaaaagctgggtattaaactgccgctgggtcgtgacggttccgaaccgaaaatgcagcgcctgggcgatatgacggcagttgaaatcaaaggtcgcattcattttgatctgtaccacgtgatccgtcgcaccattaatctgccgacctatacgctggaagcagtttacgaagctatcttcggcaagccgaaagaaaaggtctatgcccatgaaattgcagaagcttgggaaacgggcaagggtctggaacgtgtcgctaaatatagcatggaagatgcgaaggtgacctacgaactgggtcgtgaatttttcccgatggaagcacagctgagccgcctggtcggccaaccgctgtgggatgtgtctcgtagttccaccggtaacctggtggaatggtatctgctgcgtaaagcgtatgaacgcaacgaactggctccgaataagccggatgaacgcgaactggttcgtcgccgtaacagctataccggcggttacgtcaaagaaccggaacgcggcctgtgggataatatcgtttatctggactttcgtagtctgtacccgtccattatcattacccataacgtgtcaccggacacgctgaatcgtgaaggctgcaaagaatatgatgaagccccgcaagtgggtcacaagttctgtaaagactttccgggcttcattccgtcgctgctgggtaacctgctggatgaacgccagaaaatcaagaaacgtatgaaggcaaccattgatccgctggaaaagaaactgctggactatcgtcaacgcgctatcaaaattctggcgaattcttattacggctattacgcgtatgcgcgtgcgcgctggtactgcaaagaatgtgccgaaagtgtgaccgcatggggccgcgaatatattgaaatgtccatccgtgaaatcgaagaaaagtacggtttcaaggttctgtacgcggataccgacggtttccacgcaacgatcccgggtgccgatgcagaaaccgtgaagaaaaaggcgatggaattcctgaagtacatcaacgctaagctgccgggtgcgctggaactggaatatgaaggcttctacaaacgtggctttttcgtgacgaaaaagaaatacgccgttatcgacgaagaaggcaaaattaccacgcgcggtctggaaatcgtgcgccgtgattggagtgaaattgccaaagaaacccaggcacgtgtgctggaagctctgctgaaagatggcaatgttgaagaagcggtttccattgtcaaagaagtgacggaaaagctgggtaaatatgaagtcccgccggaaaaactggtgatccatgaacaaattacccgcgaactgaaggattacaaagcgacgggcccgcacgttgctatcgcgaaacgtctggcagcgcgtggcgtgaagattcgtccgggtaccgttatcagctatattgtcctgaaaggctctggtcgtatcggtgaccgcgcgattccgtttgatgaattcgacccgacgaaacatcgctacgatgcagaatattacatcgaaaaccaggttctgccggctgtcgaacgtattctgaaagcgtttggctatcgtgccgaagatctgcgctaccagaaaacccgtcaagtgggcctgggtgtttggctgcaaccgaaaggtaagaaataa

SEQ ID NO: 570 - DNA, 2325 bp, Artificial Sequence
  Synthetic
atgatcctggacgcaaactacattaccgaagatggcaaaccgattatccgcattttcaagaaggaaaacggcgaatttaaggtggaatatgaccgtaactttcgcccgtatatttacgctctgctgaaagatgacagccagatcgatgaagtgaaaaagattaccgcggaacgtcatggcaaaatcgttcgcattgttgatgtcgaaaaggtcaaaaagaaatttctgggtcgcccgattgaagtgtggaaactgtatttcgaacatccgcaagatgttccggctatccgtgacaaaattcgcgaacacccggcggtggttgatatctttgaatatgacattccgttcgcgaagcgttacctgatcgataaaggcctgattccgatggaaggtgacgaagaactgaaactgctggcctttgatattgaaacgctgtaccacgaaggcgaagaattcgcaaaaggtccgattatcatgatcagctatgcggacgaagaaggcgccaaagttattacctggaagaaagtcgatctgccgtatgtggaagtcgtgagctctgaacgtgaaatgatcaaacgctttctgaaagtgattcgcgaaaaagatccggacgttattatcacctataacggcgatagtttcgacctgccgtacctggtgaaacgtgccgaaaagctgggtattaaactgccgctgggtcgtgacggttccgaaccgaaaatgcagcgcctgggcgatatgacggcagttgaaatcaaaggtcgcattcattttgatctgtaccacgtgatccgtcgcaccattaatctgccgacctatacgctggaagcagtttacgaagctatcttcggcaagccgaaagaaaaggtctatgcccatgaaattgcagaagcttgggaaacgggcaagggtctggaacgtgtcgctaaatatagcatggaagatgcgaaggtgacctacgaactgggtcgtgaatttttcccgatggaagcacagctgagccgcctggtcggccaaccgctgtgggatgtgtctcgtagttccaccggtaacctggtggaatggtatctgctgcgtaaagcgtatgaacgcaacgaactggctccgaataagccggatgaacgcgaactggttcgtcgccgtaacagctataccggcggttacgtcaaagaaccggaacgcggcctgtgggataatatcgtttatctggactttcgtagtctgtacccgtccattatcattacccataacgtgtcaccggacacgctgaatcgtgaaggctgcaaagaatatgatgaagccccgcaagtgggtcacaagttctgtaaagactttccgggcttcattccgtcgctgctgggtaacctgctggatgaacgccagaaaatcaagaaacgtatgaaggcaaccattgatccgctggaaaagaaactgctggactatcgtcaacgcgctatcaaaattctggcgaattcttattacggctattacgcgtatgcgcgtgcgcgctggtactgcaaagaatgtgccgaaagtgtgaccgcatggggccgcgaatatattgaaatgtccatccgtgaaatcgaagaaaagtacggtttcaaggttctgtacgcggataccgacggtttccacgcaacgatcccgggtgccgatgcagaaaccgtgaagaaaaaggcgatggaattcctgaagtacatcaacgctaagctgccgggtgcgctggaactggaatatgaaggcttctacaaacgtggctttttcgtgacgaaaaagaaatacgccgttatcgacgaagaaggcaaaattaccacgcgcggtctggaaatcgtgcgccgtgattggagtgaaattgccaaagaaacccaggcaaaggttctggaagcaattctgaaacatggtaacgtcgaagaagcggtcaagatcgtgaaagaagttaccgaaaaactgtcgaattatgaaattccggtcgaaaagctggtgatctacgaacaaattacgcgcccgctgaacgaatataaagccattggcccgcacgtggcagttgctaaacgtctggcggccaagggtatcaagattaaaccgggcatggtgattggttatgttgtcctgcgcggcgatggtccgatcagcaaacgtgcgatcgccatcgaagaattcgatggcaaaaagcataagtacgacgcagaatactacatcgaaaatcaggttctgccggccgtcgaacgtatcctgaaagcattcggttataagcgtgaagatctgcgctggcagaagaccaaacaagtgggcctgggtgcgtggctgaaagttaaaaagtcttaa

SEQ ID NO: 571 - DNA, 2328 bp, Artificial Sequence
  Synthetic
atgatcctggacgcaaactacattaccgaagatggcaaaccgattatccgcattttcaagaaggaaaacggcgaatttaaggtggaatatgaccgtaactttcgcccgtatatttacgctctgctgaaagatgacagccagatcgatgaagtgaaaaagattaccgcggaacgtcatggcaaaatcgttcgcattgttgatgtcgaaaaggtcaaaaagaaatttctgggtcgcccgattgaagtgtggaaactgtatttcgaacatccgcaagatgttccggctatccgtgacaaaattcgcgaacacccggcggtggttgatatctttgaatatgacattccgttcgcgaagcgttacctgatcgataaaggcctgattccgatggaaggtgacgaagaactgaaactgctggcctttgatattgaaacgctgtaccacgaaggcgaagaattcgcaaaaggtccgattatcatgatcagctatgcggacgaagaaggcgccaaagttattacctggaagaaagtcgatctgccgtatgtggaagtcgtgagctctgaacgtgaaatgatcaaacgctttctgaaagtgattcgcgaaaaagatccggacgttattatcacctataacggcgatagtttcgacctgccgtacctggtgaaacgtgccgaaaagctgggtattaaactgccgctgggtcgtgacggttccgaaccgaaaatgcagcgcctgggcgatatgacggcagttgaaatcaaaggtcgcattcattttgatctgtaccacgtgatccgtcgcaccattaatctgccgacctatacgctggaagcagtttacgaagctatcttcggcaagccgaaagaaaaggtctatgcccatgaaattgcagaagcttgggaaacgggcaagggtctggaacgtgtcgctaaatatagcatggaagatgcgaaggtgacctacgaactgggtcgtgaatttttcccgatggaagcacagctgagccgcctggtcggccaaccgctgtgggatgtgtctcgtagttccaccggtaacctggtggaatggtatctgctgcgtaaagcgtatgaacgcaacgaactggctccgaataagccggatgaacgcgaactggttcgtcgccgtaacagctataccggcggttacgtcaaagaaccggaacgcggcctgtgggataatatcgtttatctggactttcgtagtctgtacccgtccattatcattacccataacgtgtcaccggacacgctgaatcgtgaaggctgcaaagaatatgatgaagccccgcaagtgggtcacaagttctgtaaagactttccgggcttcattccgtcgctgctgggtaacctgctggatgaacgccagaaaatcaagaaacgtatgaaggcaaccattgatccgctggaaaagaaactgctggactatcgtcaacgcgctatcaaaattctggcgaattcttattacggctattacgcgtatgcgcgtgcgcgctggtactgcaaagaatgtgccgaaagtgtgaccgcatggggccgcgaatatattgaaatgtccatccgtgaaatcgaagaaaagtacggtttcaaggttctgtacgcggataccgacggtttccacgcaacgatcccgggtgccgatgcagaaaccgtgaagaaaaaggcgatggaattcctgaagtacatcaacgctaagctgccgggtgcgctggaactggaatatgaaggcttctacaaacgtggctttttcgtgacgaaaaagaaatacgccgttatcgacgaagaaggcaaaattaccacgcgcggtctggaaatcgtgcgccgtgattggagtgaaattgccaaagaaacccaggcacgtgttctggaagcactgctgaaagatggtaatgtcgaagaagcagtgagtattgttaaagaagtcacggaaaaactgtccaagtatgaagtcccgccggaaaaactggtgattcatgaacaaatcacccgcgaactgaaagattacaaggcgacgggcccgcacgtggcaattgctaaacgtctggcagcgcgtggcgttaagatccgtccgggtaccgttattagctatatcgtcctgaaaggctctggtcgtattggtgaccgcgccatcccgtttgatgaattcgacccggctaaacaccgctacgatgcggaatattacattgaaaatcaggtcctgccggctgtggaacgtatcctgaaagcgtttggctatcgtaaggaagatctgcgctaccagaaaacccgtcaagtgggcctgggtgcgtggctgaaaccgaagggtaaaaagtaa

SEQ ID NO: 572 - DNA, 2328 bp, Artificial Sequence
  Synthetic
atgatcctggacgcaaactacattaccgaagatggcaaaccgattatccgcattttcaagaaggaaaacggcgaatttaaggtggaatatgaccgtaactttcgcccgtatatttacgctctgctgaaagatgacagccagatcgatgaagtgaaaaagattaccgcggaacgtcatggcaaaatcgttcgcattgttgatgtcgaaaaggtcaaaaagaaatttctgggtcgcccgattgaagtgtggaaactgtatttcgaacatccgcaagatgttccggctatccgtgacaaaattcgcgaacacccggcggtggttgatatctttgaatatgacattccgttcgcgaagcgttacctgatcgataaaggcctgattccgatggaaggtgacgaagaactgaaactgctggcctttgatattgaaacgctgtaccacgaaggcgaagaattcgcaaaaggtccgattatcatgatcagctatgcggacgaagaaggcgccaaagttattacctggaagaaagtcgatctgccgtatgtggaagtcgtgagctctgaacgtgaaatgatcaaacgctttctgaaagtgattcgcgaaaaagatccggacgttattatcacctataacggcgatagtttcgacctgccgtacctggtgaaacgtgccgaaaagctgggtattaaactgccgctgggtcgtgacggttccgaaccgaaaatgcagcgcctgggcgatatgacggcagttgaaatcaaaggtcgcattcattttgatctgtaccacgtgatccgtcgcaccattaatctgccgacctatacgctggaagcagtttacgaagctatcttcggcaagccgaaagaaaaggtctatgcccatgaaattgcagaagcttgggaaacgggcaagggtctggaacgtgtcgctaaatatagcatggaagatgcgaaggtgacctacgaactgggtcgtgaatttttcccgatggaagcacagctgagccgcctggtcggccaaccgctgtgggatgtgtctcgtagttccaccggtaacctggtggaatggtatctgctgcgtaaagcgtatgaacgcaacgaactggctccgaataagccggatgaacgcgaactggttcgtcgccgtaacagctataccggcggttacgtcaaagaaccggaacgcggcctgtgggataatatcgtttatctggactttcgtagtctgtacccgtccattatcattacccataacgtgtcaccggacacgctgaatcgtgaaggctgcaaagaatatgatgaagccccgcaagtgggtcacaagttctgtaaagactttccgggcttcattccgtcgctgctgggtaacctgctggatgaacgccagaaaatcaagaaacgtatgaaggcaaccattgatccgctggaaaagaaactgctggactatcgtcaacgcgctatcaaaattctggcgaattcttattacggctattacgcgtatgcgcgtgcgcgctggtactgcaaagaatgtgccgaaagtgtgaccgcatggggccgcgaatatattgaaatgtccatccgtgaaatcgaagaaaagtacggtttcaaggttctgtacgcggataccgacggtttccacgcaacgatcccgggtgccgatgcagaaaccgtgaagaaaaaggcgatggaattcctgaagtacatcaacgctaagctgccgggtgcgctggaactggaatatgaaggcttctacaaacgtggctttttcgtgacgaaaaagaaatacgccgttatcgacgaagaaggcaaaattaccacgcgcggtctggaaatcgtgcgccgtgattggagtgaaattgccaaagaaacccaggcacgcgtcctggaagcaatcctgaaagatggtgacgtggaagaagccgtccgtattgtgaaagaagttacggaaaaactgtccaaatatgaagttccgccggaaaaactggtcatccatgaacaaattacccgcgaactgaaagattacaaagcgacgggcccgcacgtcgcaatcgctaaacgtctggcggcgcgtggcgtgaaaattcgtccgggtaccgtgatctcatatattgttctgaaaggctcgggtcgtatcggtgaccgcgctattccgtttgatgaattcgacccgaaaaaacacaaatacgatgcggaatactacatcgaaaaccaggttctgccggccgtcgaacgtattctgcgcgcatttggctaccgtaaagaagatctgcgttatcaaaaaaccaaacaagtgggtctgggtgcgtggctgaaaccgaaaggtaaaaaataa

SEQ ID NO: 573 - DNA, 2325 bp, Artificial Sequence
  Synthetic
atgatcctggacgcaaactacattaccgaagatggcaaaccgattatccgcattttcaagaaggaaaacggcgaatttaaggtggaatatgaccgtaactttcgcccgtatatttacgctctgctgaaagatgacagccagatcgatgaagtgaaaaagattaccgcggaacgtcatggcaaaatcgttcgcattgttgatgtcgaaaaggtcaaaaagaaatttctgggtcgcccgattgaagtgtggaaactgtatttcgaacatccgcaagatgttccggctatccgtgacaaaattcgcgaacacccggcggtggttgatatctttgaatatgacattccgttcgcgaagcgttacctgatcgataaaggcctgattccgatggaaggtgacgaagaactgaaactgctggcctttgatattgaaacgctgtaccacgaaggcgaagaattcgcaaaaggtccgattatcatgatcagctatgcggacgaagaaggcgccaaagttattacctggaagaaagtcgatctgccgtatgtggaagtcgtgagctctgaacgtgaaatgatcaaacgctttctgaaagtgattcgcgaaaaagatccggacgttattatcacctataacggcgatagtttcgacctgccgtacctggtgaaacgtgccgaaaagctgggtattaaactgccgctgggtcgtgacggttccgaaccgaaaatgcagcgcctgggcgatatgacggcagttgaaatcaaaggtcgcattcattttgatctgtaccacgtgatccgtcgcaccattaatctgccgacctatacgctggaagcagtttacgaagctatcttcggcaagccgaaagaaaaggtctatgcccatgaaattgcagaagcttgggaaacgggcaagggtctggaacgtgtcgctaaatatagcatggaagatgcgaaggtgacctacgaactgggtcgtgaatttttcccgatggaagcacagctgagccgcctggtcggccaaccgctgtgggatgtgtctcgtagttccaccggtaacctggtggaatggtatctgctgcgtaaagcgtatgaacgcaacgaactggctccgaataagccggatgaacgcgaactggttcgtcgccgtaacagctataccggcggttacgtcaaagaaccggaacgcggcctgtgggataatatcgtttatctggactttcgtagtctgtacccgtccattatcattacccataacgtgtcaccggacacgctgaatcgtgaaggctgcaaagaatatgatgaagccccgcaagtgggtcacaagttctgtaaagactttccgggcttcattccgtcgctgctgggtaacctgctggatgaacgccagaaaatcaagaaacgtatgaaggcaaccattgatccgctggaaaagaaactgctggactatcgtcaacgcgctatcaaaattctggcgaattcttattacggctattacgcgtatgcgcgtgcgcgctggtactgcaaagaatgtgccgaaagtgtgaccgcatggggccgcgaatatattgaaatgtccatccgtgaaatcgaagaaaagtacggtttcaaggttctgtacgcggataccgacggtttccacgcaacgatcccgggtgccgatgcagaaaccgtgaagaaaaaggcgatggaattcctgaagtacatcaacgctaagctgccgggtgcgctggaactggaatatgaaggcttctacaaacgtggctttttcgtgacgaaaaagaaatacgccgttatcgacgaagaaggcaaaattaccacgcgcggtctggaaatcgtgcgccgtgattggagtgaaattgccaaagaaacccaggcacgtgttctggaagcaattctgaaacatggtaacgtcgaagaagcggtcaaaatcgtgaaagaagttacggaaaaactgtctaactacgaaattccgccggaaaaactggccatctacgaacaaattacccgcccgctgcatgaatataaagcaatcggtccgcacgtcgcagtggcaaaacgtctggcagcacgcggcgttaaagtcaaaccgggtatggtcatcggctatattgtgctgcgtggtgatggcccgatcagcaaccgcgcaattctggctgaagaatacgatctgaaaaaacacaaatacgacgccgaatattacatcgaaaatcaggttctgccggctgtcctgcgtattctggaagcgtttggctatcgtaaagaagatctgcgctggcagaaaacccgtcaaacgggtctgacctcatggctgaatattaaaaaatcgtaa

SEQ ID NO: 574 - DNA, 2325 bp, Artificial Sequence
  Synthetic
atgatcctggacgcaaactacattaccgaagatggcaaaccgattatccgcattttcaagaaggaaaacggcgaatttaaggtggaatatgaccgtaactttcgcccgtatatttacgctctgctgaaagatgacagccagatcgatgaagtgaaaaagattaccgcggaacgtcatggcaaaatcgttcgcattgttgatgtcgaaaaggtcaaaaagaaatttctgggtcgcccgattgaagtgtggaaactgtatttcgaacatccgcaagatgttccggctatccgtgacaaaattcgcgaacacccggcggtggttgatatctttgaatatgacattccgttcgcgaagcgttacctgatcgataaaggcctgattccgatggaaggtgacgaagaactgaaactgctggcctttgatattgaaacgctgtaccacgaaggcgaagaattcgcaaaaggtccgattatcatgatcagctatgcggacgaagaaggcgccaaagttattacctggaagaaagtcgatctgccgtatgtggaagtcgtgagctctgaacgtgaaatgatcaaacgctttctgaaagtgattcgcgaaaaagatccggacgttattatcacctataacggcgatagtttcgacctgccgtacctggtgaaacgtgccgaaaagctgggtattaaactgccgctgggtcgtgacggttccgaaccgaaaatgcagcgcctgggcgatatgacggcagttgaaatcaaaggtcgcattcattttgatctgtaccacgtgatccgtcgcaccattaatctgccgacctatacgctggaagcagtttacgaagctatcttcggcaagccgaaagaaaaggtctatgcccatgaaattgcagaagcttgggaaacgggcaagggtctggaacgtgtcgctaaatatagcatggaagatgcgaaggtgacctacgaactgggtcgtgaatttttcccgatggaagcacagctgagccgcctggtcggccaaccgctgtgggatgtgtctcgtagttccaccggtaacctggtggaatggtatctgctgcgtaaagcgtatgaacgcaacgaactggctccgaataagccggatgaacgcgaactggttcgtcgccgtaacagctataccggcggttacgtcaaagaaccggaacgcggcctgtgggataatatcgtttatctggactttcgtagtctgtacccgtccattatcattacccataacgtgtcaccggacacgctgaatcgtgaaggctgcaaagaatatgatgaagccccgcaagtgggtcacaagttctgtaaagactttccgggcttcattccgtcgctgctgggtaacctgctggatgaacgccagaaaatcaagaaacgtatgaaggcaaccattgatccgctggaaaagaaactgctggactatcgtcaacgcgctatcaaaattctggcgaattcttattacggctattacgcgtatgcgcgtgcgcgctggtactgcaaagaatgtgccgaaagtgtgaccgcatggggccgcgaatatattgaaatgtccatccgtgaaatcgaagaaaagtacggtttcaaggttctgtacgcggataccgacggtttccacgcaacgatcccgggtgccgatgcagaaaccgtgaagaaaaaggcgatggaattcctgaagtacatcaacgctaagctgccgggtgcgctggaactggaatatgaaggcttctacaaacgtggctttttcgtgacgaaaaagaaatacgccgttatcgacgaagaaggcaaaattaccacgcgcggtctggaaatcgtgcgccgtgattggagtgaaattgccaaagaaacccaggcaaaagttctggaagcaatcctgaaacatggtaatgtcgaagaagcagtgaaaattgtcaaggaagtgacggaaaaactgtcgaagtatgaaatcccgccggaaaaactggtgatctacgaacaaattacccgcccgctgcatgaatataaagcgattggcccgcacgtggcagttgctaaacgtctggcagcccgcggtgtcaaagtgcgtccgggcatggtgatcggttatattgttctgcgtggcgatggtccgatcagtaaacgcgcgattctggccgaagaatttgatccgcgcaaacacaagtacgacgccgaatattacatcgaaaaccaggtgctgccggctgttctgcgtattctggaagcgttcggctatcgtaaagaagatctgcgctggcagaaaaccaagcaaacgggtctgaccgcatggctgaatgtgaaaaagaaataa

SEQ ID NO: 575 - DNA, 2328 bp, Pyrococcus furiosus
atgattttagatgtggattacataactgaagaaggaaaacctgttattaggctattcaaaaaagagaacggaaaatttaagatagagcatgatagaacttttagaccatacatttacgctcttctcagggatgattcaaagattgaagaagttaagaaaataacgggggaaaggcatggaaagattgtgagaattgttgatgtagagaaggttgagaaaaagtttctcggcaagcctattaccgtgtggaaactttatttggaacatccccaagatgttcccactattagagaaaaagttagagaacatccagcagttgtggacatcttcgaatacgatattccatttgcaaagagatacctcatcgacaaaggcctaataccaatggagggggaagaagagctaaagattcttgccttcgatatagaaaccctctatcacgaaggagaagagtttggaaaaggcccaattataatgattagttatgcagatgaaaatgaagcaaaggtgattacttggaaaaacatagatcttccatacgttgaggttgtatcaagcgagagagagatgataaagagatttctcaggattatcagggagaaggatcctgacattatagttacttataatggagactcattcgacttcccatatttagcgaaaagggcagaaaaacttgggattaaattaaccattggaagagatggaagcgagcccaagatgcagagaataggcgatatgacggctgtagaagtcaagggaagaatacatttcgacttgtatcatgtaataacaaggacaataaatctcccaacatacacactagaggctgtatatgaagcaatttttggaaagccaaaggagaaggtatacgccgacgagatagcaaaagcctgggaaagtggagagaaccttgagagagttgccaaatactcgatggaagatgcaaaggcaacttatgaactcgggaaagaattccttccaatggaaattcagctttcaagattagttggacaacctttatgggatgtttcaaggtcaagcacagggaaccttgtagagtggttcttacttaggaaagcctacgaaagaaacgaagtagctccaaacaagccaagtgaagaggagtatcaaagaaggctcagggagagctacacaggtggattcgttaaagagccagaaaaggggttgtgggaaaacatagtatacctagattttagagccctatatccctcgattataattacccacaatgtttctcccgatactctaaatcttgagggatgcaagaactatgatatcgctcctcaagtaggccacaagttctgcaaggacatccctggttttataccaagtctcttgggacatttgttagaggaaagacaaaagattaagacaaaaatgaaggaaactcaagatcctatagaaaaaatactccttgactatagacaaaaagcgataaaactcttagcaaattctttctacggatattatggctatgcaaaagcaagatggtactgtaaggagtgtgctgagagcgttactgcctggggaagaaagtacatcgagttagtatggaaggagctcgaagaaaagtttggatttaaagtcctctacattgacactgatggtctctatgcaactatcccaggaggagaaagtgaggaaataaagaaaaaggctctagaatttgtaaaatacataaattcaaagctccctggactgctagagcttgaatatgaagggttttataagaggggattcttcgttacgaagaagaggtatgcagtaatagatgaagaaggaaaagtcattactcgtggtttagagatagttaggagagattggagtgaaattgcaaaagaaactcaagctagagttttggagacaatactaaaacacggagatgttgaagaagctgtgagaatagtaaaagaagtaatacaaaagcttgccaattatgaaattccaccagagaagctcgcaatatatgagcagataacaagaccattacatgagtataaggcgataggtcctcacgtagctgttgcaaagaaactagctgctaaaggagttaaaataaagccaggaatggtaattggatacatagtacttagaggcgatggtccaattagcaatagggcaattctagctgaggaatacgatcccaaaaagcacaagtatgacgcagaatattacattgagaaccaggttcttccagcggtacttaggatattggagggatttggatacagaaaggaagacctcagataccaaaagacaagacaagtcggcctaacttcctggcttaacattaaaaaatcctag

SEQ ID NO: 576 - DNA, 1068 bp, Thermococcus profundus
atgattctggacgctgactatattacggaaaatggcaagccggttgtgcgcatcttcaaaaaggaaaatggcgaattcaaggtggaatatgatcgcaactttgaaccgtatatttacgccctgctgaaagatgacagtgcaatcgaagaaattaaaaagatcaccgccgaacgccatggcaccgtggttcgtatcacgaaagcagaaaaggttgaacgtaaatttctgggtcgcccggtggaagtttggaaactgtatttcacgcatccgcaggatgtgccggccattcgtgacaaaatccgctctcacccggcagtcgtggatatttatgaatacgacatcccgtttgccaaacgttatctgattgataagggcctggttccgatggaaggtgacgaagaactgaaaatgctggcttttgatatcgaaaccctgtatcacgaaggcgaagaattcgcggaaggtccgattctgatgatctcatacgcagacgaatcggaagctcgcgtgattacctggaaaaaggttgatctgccgtatgttgacgctgtcagcacggaaaaagatatgattaaggcgtttctgcgtgttgtcaaagaaaaggatccggacgttctgatcacctataacggcgataattttgacttcgcttacctgaaaaagcgctgcgaaaaactgggtgtgaagttcattctgggccgtgacggttctgaaccgaaaatccagcgtatgggcgatcgctttgcagtcgacgtgaaaggtcgcattcatttcgatctgtatccggtgattcgtcgcaccatcaacctgccgacctatacgctggaagcggtctacgaagccatttttggccgtccgaaagaaaaggtgtatgccgaagaaatcgcacaagcttgggaaaccaatgaaggcctggaacgtgtcgctcgctatagcatggaagatgcgaaagtgacgtacgaactgggcaaggaatttttcccgatggaagcgcagctgtcacgcctgattggccaaccgctgtgggatgtgtcgcgtagctctaccggtaacctggttgaatggttc

SEQ ID NO: 577 - DNA, 1068 bp, Thermococcus gammatolerans
atgattctggatacggactatattacggaaaatggcaagccggttattcgtgtgttcaaaaaggaaaatggcgaattcaagatcgaatatgatcgtacctttgaaccgtatttctacgctctgctgaaagatgacagcgcgatcgaagatgtcaaaaaggtgaccgccaaacgccatggcacggtggttcgcgtcaagcgtgcagaaaaagtgcagcgcaagtttctgggtcgtccgattgaagtttggaaactgtatttcacccatccgcaagatgtcccggcaatccgcgacaaaattcgtgcacacccggctgtgatcgatatttatgaatacgacatcccgtttgcgaaacgttatctgatcgataagggcctgattccgatggaaggtgacgaagaactgaccatgctggcctttgatattgaaacgctgtatcacgaaggcgaagaattcggcaccggtccgatcctgatgatttcatacgcagatggttcggaagctcgcgtgatcacctggaaaaagattgatctgccgtatgttgacgtcgtgagcacggaaaaagaaatgatcaagcgctttctgcgtattgtgaaagaaaaggatccggacgttctgattacctataacggcgataattttgacttcgcatacctgaaaaagcgttgcgaaaaactgggtatcaagttcacgctgggccgcgacggttctgaaccgaaaattcagcgcatgggcgatcgttttgcggttgaagtcaaaggtcgtatccatttcgatctgtatccggttatccgtcgcaccattaacctgccgacctatacgctggaagcggtttacgaagccgtctttggcaaaccgaaggaaaaagtgtacgcggaagaaattgcacaggcttgggaatcaggcgaaggtctggaacgcgtggcccgttattcgatggaagatgcaaaagttacctacgaactgggtcgcgaatttttcccgatggaagcccagctgagccgtctgatcggccaaagcctgtgggatgtttctcgcagctctacgggtaacctggtcgaatggttt

SEQ ID NO: 578 - DNA, 1068 bp, Thermococcus radiotolerans
atgattctggacacggactatattacggaagatggcaagccggttatccgcattttcaagaaggaaaatggcgaattcaagatcgaatatgatcgtgaatttgaaccgtatatctacgctctgctgaaagatgacagcgcgatcgaagaagtgaaaaagattaccgctggccgccatggtcgtgtggttaaggtgaaacgcgcggaaaaagttaaaaagaaatttctgggccgtccgattgaagtgtggaaactgtatttcacccatccgcaggatgttccggccatccgtgacgaaattcgtcgccacagcgcagtcgtggatatctatgaatacgacattccgtttgcgaaacgctatctgatcgataagggcctgattccgatggaaggtgacgaagaactgaagatgatgagcttcgatatcgaaaccctgtatcacgaaggcgaagaattcggcacgggtccgatcctgatgatttcttacgcagacgaaggtgaagctcgtgtcatcacctggaagaaaattgatctgccgtatgtggaagttgtcagcacggaaaaggaaatgatcaaacgctttctgaaggtggttaaggaaaaagatccggacgtgctgattacctataacggtgataattttgacttcgcatacctgaagaaacgttgcgaaaaaatcggcattaagttcacgctgcgtcgcgacggttctgaaccgaaaatccagcgcatgggcgatcgttttgcggtcgaagtgaaaggtcgcattcatttcgatctgtatccggttatccgtcgcaccattaacctgccgacctatacgctggaagcggtttacgaagccgtctttggcaccccgaaggaaaaagtgtacccggaagaaattaccacggcctgggaaacgggcgaaggtctggaacgcgtcgcccgttatagtatggaagatgcaaaagtgacctacgaactgggtcgcgaatttttcccgatggaagcacagctgtcccgtctgatcggccaatcactgtgggatgtgtcgcgcagctctacgggtaacctggttgaatggttc

SEQ ID NO: 579 - DNA, 1068 bp, Pyrococcus sp. NA2
atgattctggatgctgattacattacggaagatggcaagccgattattcgcctgttcaaaaaggaaaacggtcgcttcaaggtggaatacgatcgtaactttcgcccgtatatttacgctctgctgaaagatgacagcgcgatcgatgacgtgcgtaaaattacctctgaacgccacggcaaggtggttcgtgtcatcgatgtggaaaaggttaaaaagaaattcctgggtcgcccgatcgaagtgtggaaactgtatttcgaacatccgcaggatgttccggctatgcgtgacaaaattcgcgaacacccggcggttatcgatatttttgaatatgacatcccgttcgctaaacgttacctgatcgataagggcctgattccgatggagggtaacgaagaactgacctttctggcggtggacattgaaacgctgtaccatgaaggcgaagaattcggcaaaggtccgattatcatgatcagctatgcagatgaagaaggtgctaaagtcatcacctggaagaaaattgacctgccgtatgtggaagtcgtggccaatgaacgtgaaatgattaagcgcctgatcaaagttattcgcgaaaaagatccggacgtcattatcacgtataacggcgataattttgacttcccgtacctgctgaagcgtgccgaaaaactgggcatgaagctgccgctgggtcgcgataacagtgaaccgaaaatgcagcgtctgggcgactccctggcagttgaaatcaaaggtcgcattcattttgacctgtttccggtgatccgtcgcaccattaatctgccgacctatacgctggaagcggtttacgaagccatcttcggcaagcaaaaggaaaaggtctacccgcacgaaatcgcagaagcttgggaaaccggcaaaggtctggaacgtgtcgccaagtatagtatggaagatgcaaaagtgacgtacgaactgggcaaggaatttttcccgatggaagcacagctggctcgcctggtgggccaaccgctgtgggacgtttcccgtagctctaccggtaatctggtggaatggtat

SEQ ID NO: 580 - DNA, 1068 bp, Thermococcus gammatolerans
atgatcctggatgcggactacattaccgaagacggcaaaccggtcgtgcgtatcttcaaaaaagaaaacggcgaattcaaaatcgaatatgatcgcaactttgaaccgtatatctacgctctgctgaaagatgactccgcgatcgaagaagtgaagaaaattaccgccgaacgccatggcaaagtggttcgtgtcaaacgcgcagaaaaagtgaagaaaaaatttctgggtcgtccgattgaagtttggaaactgtatttcgaacatccgcaggatgtcccggctatccgtgacaaaattcgcgaacacccggcggtcgtggatatctatgaatacgacattccgtttgctaaacgttatctgatcgataaaggcctgattccgatggaaggtgacgaagaactgaaaatgctggcctttgatattgaaaccctgtatcacgaaggcgaagaattcggcaaaggtccgatcctgatgatttcatacgcagacgaagaagaagcgcgtgtgatcacctggaagaaaattgatctgccgtatgttgaagttgtctcgacggaacgtgaaatgatcaaacgttttctgcgcgtcattaaagaaaaagatccggacgtgctgatcacctataacggcgataattttgacttcgcatacctgaaaaaacgctgcgaaaaactgggtatcaaattcacgctgggccgtgatggtagcgaaccgaaaattcaacgtatgggcgatcgctttgcggtggacgttaaaggtcgcattcatttcgatctgtatccggttatccgtcgcaccattaatctgccgacctatacgctggaagcggtttacgaagccatctttggcaaaccgaaagaaaaagtgtacgccgaagaaattgcagaagcttgggaaaccggcgaaggtctggaacgtgtggcccgctattcaatggaagatgcaaaagttacgtacgaactgggtcgtgaatttttcccgatggaagcgcagctgagccgcctgattggccaaccgctgtgggatgtttctcgtagctctaccggtaacctggtcgaatggttc

SEQ ID NO: 581 - DNA, 1068 bp, Thermococcus celericrescens
atgatcctggacgtggactacattaccgaagacggcaaaccgattatccgcatcttcaaaaaagaaaacggcaaattcaaagtggaatatgatcgtaactttcgcccgtatatttacgctctgctgaaagatgacagccagatcgaagaagtccgcaaaattacggcggaacgtcatggtaaaatcgtgcgcatcatcgatgtggaaaaagttgagaaaaaatttctgggccgtccgattaccgtgtggcgcctgtatttcgaacatccgcaagatgttccggctatccgtgacaaagttcgcgaacacagtgcggtcatcgatatttttgaatatgacattccgttcgctaaacgctacctgatcgataaaggtctgattccgatggaaggcgacgaagaactgaaactgctggcctttgatattgaaacgctgtaccacgaaggtgaagaattcggtaaaggcccgattatcatgatctcctatgcagacgaagaagaagcgaaagtcatcacctggaagaaaattgatctgccgtatgtggaagtggttagctctgaacgtgaaatgatcaaacgctttctgaaaatcatccgcgaaaaagatccggacgttattatcacctataacggtgattcattcgacctgccgtacctggtgaaacgtgccgaaaaactgggcatcaaactgacgattggtcgtgacggctcggaaccgaaaatgcagcgcctgggtgatatgaccgcagtcgaaatcaaaggccgtattcattttgatctgtaccacgtgatcacccgcacgattaacctgccgacctatacgctggaagcggtttacgaagccattttcggtaaaccgaaagaaaaagtctatgccgacgaaatcgcagaagcttgggaaagtggcgaaaatctggaacgcgtggcaaaatattccatggaagatgcgaaagccacctacgaactgggtcgtgaatttctgccgatggaaattcagctgtcacgcctggtgggtcaaccgctgtgggacgtttcgcgtagttccaccggcaatctggttgaatggttc

SEQ ID NO: 582 - DNA, 1068 bp, Pyrococcus glycovorans
atgatcctggacaccgattacattaccgaagatggcaagccggttatccgcattttcaagaaagacaacggcgaatttaagattgaatatgatcgcaactttgaaccgtatatttacgcactgctgcgtgatgacagcgctatcgaagatgttaaaaagattaccgcggaacgtcatggccgcgtggttaaggtgaaacgcgccgaaaaagttaaaaagaaatttctgggtcgtccggtggaagtttggaaactgtatttcacgcgtccgcaggatgtgccggcaatccgtgaccgtattcgtgcacacccggcagtcgtggatatctatgaatacgacattccgtttgcaaaacgctacctgatcgataagggcattatcccgatggaaggtgacgaagaactgaaaatgctggcatttgatattgaaaccctgtatcatgaaggcgaagaattcgctgaaggtccgatcctgatgattagctacgccgatgaaaatgaagcacgcgtcatcacctggaagaaaattgatctgccgtttgtggacgttgtctctacggaaaaggaaatgatcaaacgtttcctgaaggtcattaaggaaaaagatccggacgtgctgattacctataacggcgataattttgacttcgcgtacctgaagaaacgctgcgaaaaatttggtatcaagttcacgctgggccgtgatggtagcgacccgaaaattcagcgtatgggcgaccgctttgccgtcgaagtgaaaggtcgtatccacttcgatctgtatccggtcattctgcgcaccgtgaacctgccgacctatacgctggaagctgtttacgaagcgatctttggcaccccgaaggaaaaagtgtatccggaagaaattaccacggcatgggaaacgggcgaaggtctggaacgtgttgcgcgctactcaatggaagatgccaaagtcacctttgaactgggtcgtgaatttttcccgatggaagcgcagctgtcgcgcctggttggccaatcattttgggatgtctcgcgtagctctacgggtaatctggtggaatggttc

SEQ ID NO: 583 - DNA, 1068 bp, Pyrococcus furiosus
atgatcctggacgcaaactacattaccgaagatggcaaaccgattatccgcattttcaagaaggaaaacggcgaatttaaggtggaatatgaccgtaactttcgcccgtatatttacgctctgctgaaagatgacagccagatcgatgaagtgaaaaagattaccgcggaacgtcatggcaaaatcgttcgcattgttgatgtcgaaaaggtcaaaaagaaatttctgggtcgcccgattgaagtgtggaaactgtatttcgaacatccgcaagatgttccggctatccgtgacaaaattcgcgaacacccggcggtggttgatatctttgaatatgacattccgttcgcgaagcgttacctgatcgataaaggcctgattccgatggaaggtgacgaagaactgaaactgctggcctttgatattgaaacgctgtaccacgaaggcgaagaattcgcaaaaggtccgattatcatgatcagctatgcggacgaagaaggcgccaaagttattacctggaagaaagtcgatctgccgtatgtggaagtcgtgagctctgaacgtgaaatgatcaaacgctttctgaaagtgattcgcgaaaaagatccggacgttattatcacctataacggcgatagtttcgacctgccgtacctggtgaaacgtgccgaaaagctgggtattaaactgccgctgggtcgtgacggttccgaaccgaaaatgcagcgcctgggcgatatgacggcagttgaaatcaaaggtcgcattcattttgatctgtaccacgtgatccgtcgcaccattaatctgccgacctatacgctggaagcagtttacgaagctatcttcggcaagccgaaagaaaaggtctatgcccatgaaattgcagaagcttgggaaacgggcaagggtctggaacgtgtcgctaaatatagcatggaagatgcgaaggtgacctacgaactgggtcgtgaatttttcccgatggaagcacagctgagccgcctggtcggccaaccgctgtgggatgtgtctcgtagttccaccggtaacctggtggaatggtat

SEQ ID NO: 584 - DNA, 771 bp, Thermococcus profundus
ctgctgcgtaaagcgtatgaacgcaacgaactggcaccgaataaaccgtccggccgcgaatacgatgaacgtcgcggcggttatgcgggcggttacgttaaagaaccggaaaagggtctgtgggaaaacatcgtctacctggattacaagagtctgtatccgtccattatcattacccataacgttagtccggacacgctgaatcgcgaaggctgcaaagaatacgatgtggcgccgcaggttggtcaccgtttttgtaaagactttccgggcttcattccgtccctgctgggtgatctgctggaagaacgtcagaaaatcaagcgcaaaatgaaggccaccattgatccgatcgaacgtcgcctgctggactatcgtcaacgcgcgatcaaaattctggccaacagctattacggctattacggttatgcgcgtgcccgctggtactgcaaagaatgtgcagaaagcgttacggcttggggccgcgaatacatcgaaatgtctatccgtgaaatcgaagaaaagtacggtttcaaggtgctgtacgctgataccgacggcttccatgcgacgattccgggtgaagatgccgaaaccatcaaaaagaaagcaatggaattcctgaagtacatcaactcaaagctgccgggcgccctggaactggaatatgaaggcttctaccgtcgcggctttttcgttacgaagaaaaagtacgcagtcattgacgaagaaggcaaaatcaccacgcgcggtctggaaattgtgcgtcgc

SEQ ID NO: 585 - DNA, 771 bp, Thermococcus gammatolerans
ctgctgcgtaaagcgtatgaacgcaacgaactggcgccgaataaaccggatgaaaaggaactggcacgtcgccgtggcggttatgcaggcggttacgtcaaagaaccggaacgtggcctgtgggataatattgtgtatctggactttcgcagtctgtacccgtccattatcattacccataacgttagtccggacacgctgaatcgcgaaggctgcaaagaatatgatgtggccccggaagttggtcacaagttctgtaaagactttccgggcttcatcccgtccctgctgggtgatctgctggaagaacgccagaagattaagcgtaagatgaaagcaaccgttgatccgctggaaaagaaactgctggactatcgccaacgtgcgatcaaaattctggccaacagctattacggctattacggttatgcgaaagcccgctggtactgccgtgaatgtgcagaatctgtgaccgcttggggccgcgaatatattgaaaccacgatccgtgaaatcgaagaaaagttcggtttcaaggttctgtacgctgataccgacggctttttcgcgacgatcccgggtgcagatgctgaaaccgtgaaaaagaaagctaaggaattcctgaagtacatcaacgcgaaactgccgggcctgctggaactggaatatgaaggcttctacgttcgtggctttttcgtcacgaagaaaaagtacgcggttatcgacgaagaaggcaaaattaccacgcgcggtctggaaatcgtgcgccgt

SEQ ID NO: 586 - DNA, 771 bp, Thermococcus radiotolerans
ctgctgcgtaaagcgtatgaacgcaacgaaattgcgccgaataaaccggatgaacgtgaactggcacgtcgccgtggcggttatgcaggcggttacgttaaagaaccggaacgcggcctgtgggataatatcgtctatctggactttatgagtctgtacccgtccattatcattacccataacgttagtccggacacgttcaatcgtgaaggctgcaaagaatatgataccgccccgcaggttggtcacaagttttgtaaagacgtccaaggcttcattccgagtctgctgggtgccctgctggatgaacgccagaaaatcaagaaacgtatgaaggcatccattgatccgctggaaaagaaactgctggactatcgccaaaaggcgatcaaaattctggccaactcatattacggctattacggttatgcacgcgctcgttggtactgcaaagaatgtgcagaatcggtgaccgcttggggccgtgattatattgaaaccacgatccacgaaattgaagaacgctttggtttcaaagttctgtacgctgataccgacggctttttcgcgacgatcccgggtgcggatgccgaaaccgtgaagaaaaaggctaaggaattcctgaagtacatcaacgcgaaactgccgggcctgctggaactggaatatgaaggcttctacgtccgtggctttttcgtgaccaaaaagaaatacgcggttatcgacgaagaaggcaaaattaccacgcgcggtctggaaatcgtgcgccgt

SEQ ID NO: 587 - DNA, 774 bp, Pyrococcus sp. NA2
ctgctgcgtaaagcgtatgaacgcaacgaactggcgccgaataaaccggatgaacgcgaatatgaacgtcgcctgcgtgaaagttatgaaggcggttacgttaaagaaccggaacgcggcctgtgggaaggtattgtgtcactggattttcgtagtctgtacccgtccattatcattacccataacgtttcgccggatacgctgaataaagaaggctgcggtgaatatgacgaagccccggaagtgggtcaccgcttctgtaaagattttccgggcttcattccgtcactgctgggttcgctgctggaagaacgccagaagatcaagaaacgtatgaaggaatctaaggatccggtggaacgcaaactgctggactatcgtcaacgcgcgatcaagattctggccaacagcttttatggctattacggttacgcgaaagcccgttggtactgcaaggaatgtgcagaaagcgtgaccgcttggggccgccagtatattgaactggtccgtcgcgaactggaagaacgtggttttaaagtgctgtatatcgataccgacggcctgtacgccacgattccgggtgaaaagaactgggaagaaatcaagcgtcgcgcactggaatttgttaactacatcaattccaaactgccgggcattctggaactggaatatgaaggcttctacacccgtggctttttcgtgacgaagaaaaagtatgcgctgatcgatgaagaaggcaaaattgtcacccgtggtctggaaatcgtgcgtcgc

SEQ ID NO: 588 - DNA, 771 bp, Thermococcus gammatolerans
ctgctgcgtaaagcgtatgaacgcaacgaactggcgccgaataaaccgtcgggccgcgaatacgatgaacgtcgcgaaggttatgcgggcggttacgttaaagaaccggaacgtggtctgtgggaaaacatcgtgtacctggattacaaaagtctgtatccgtccattatcattacccataacgtgagcccggacacgctgaatcgcgaaggctgcaaagaatacgatgtcgccccgcaagtgggtcacaaattttgtaaagactttccgggcttcattccgtctctgctgggtgatctgctggaagaacgtcagaaaattaaaaagaaaatgaaagcaaccaaagatccgattgagaaaaaactgctggactatcgtcaacgcgcgatcaaaattctggccaacagttattacggctattacggttatgcgaaagcccgctggtactgcaaagaatgtgcagaatccgttacggcttggggccgtgaatatatcgaaaccacgatccgcgaaatcgaagaaaaatacggtttcaaagtgctgtacgccgataccgacggcttccatgcaacgatcccgggtgaagatgctgaagaaattaagaaaaaagcgaaagaattcctgaaatacatcaacagcaaactgccgggcgccctggaactggaatatgaaggcttctaccgtcgcggctttttcgtgaccaagaaaaaatacgcagttatcgacgaagaaggcaaaattaccacgcgtggtctggaaatcgtgcgtcgc

SEQ ID NO: 589 - DNA, 774 bp, Thermococcus celericrescens
ctgctgcgtaaagcgtatgaacgcaacgaagtggcaccgaataaaccggatgaacgtgaatatcagcgtcgcctgcgcgaaagttatgcaggcggttacgtgaaagaaccggaaaaaggtctgtgggaaggcctggtttatctggattttcgtgcgctgtacccgagcattatcattacgcataacgtttctccggacaccctgaatcgtgaaggctgccgcgaatatgatattgcgccggaagtgggtcacaaattttgtaaagatatcccgggcttcattccgagcctgctgaaacgtctgctggaagaacgccagaaaatcaaaacgaaaatgaaagaaacccaagatccgatcgaaaaaattctgctggactaccgtcagcgcgcgatcaaaattctggccaacagttattacggttattacggctatgcaaaagctcgctggtactgcaaagaatgtgcagaatccgttaccgcttggggtcgtaaatacatcgaattcgtctggaaagaactggaagaaaaattcggtttcaaagttctgtacatcgatacggacggtctgtacgcaaccatcccgggcggtaaaccggaagaaattaagaaaaaagccctggaatttgtggattacattaatgcaaaactgccgggcctgctggaactggaatatgaaggtttctacgtgcgtggctttttcgttaccaagaaaaaatatgccgtcattgacgaagaaggtaaagtgatcacccgcggcctggaaattgttcgtcgc

SEQ ID NO: 590 - DNA, 771 bp, Pyrococcus glycovorans
ctgctgcgtaaagcgtatgaacgcaacgaactggctccgaataagccggatgaacgcgaactggttcgtcgccgtaacagctataccggcggttacgtcaaagaaccggaacgcggcctgtgggataatatcgtttatctggactttcgtagtctgtacccgtccattatcattacccataacgtgtcaccggacacgctgaatcgtgaaggctgcaaagaatatgatgaagccccgcaagtgggtcacaagttctgtaaagactttccgggcttcattccgtcgctgctgggtaacctgctggatgaacgccagaaaatcaagaaacgtatgaaggcaaccattgatccgctggaaaagaaactgctggactatcgtcaacgcgctatcaaaattctggcgaattcttattacggctattacgcgtatgcgcgtgcgcgctggtactgcaaagaatgtgccgaaagtgtgaccgcatggggccgcgaatatattgaaatgtccatccgtgaaatcgaagaaaagtacggtttcaaggttctgtacgcggataccgacggtttccacgcaacgatcccgggtgccgatgcagaaaccgtgaagaaaaaggcgatggaattcctgaagtacatcaacgctaagctgccgggtgcgctggaactggaatatgaaggcttctacaaacgtggctttttcgtgacgaaaaagaaatacgccgttatcgacgaagaaggcaaaattaccacgcgcggtctggaaatcgtgcgccgt

SEQ ID NO: 591 - DNA, 774 bp, Pyrococcus furiosus
ctgctgcgtaaagcgtatgaacgcaacgaactggcaccgaataaaccggatgaacgtgaatatgaacgtcgcctgcgcgaatcttatgccggcggttacgttaaggaaccggaaaaaggcctgtgggaaggtctggtgtctctggattttcgctcactgtacccgtcgattatcattacgcataacgtgtccccggacaccctgaatcgtgaaggctgcatggaatatgatgttgctccggaagtcaaacacaagttttgtaaagactttccgggtttcattccgtcactgctgaaacgtctgctggatgaacgccaggaaatcaaacgtcgcatgaaagcctcgaaggatccgattgaaaagaaaatgctggactatcgtcaacgcgcaatcaaaattctggctaatagctattacggctattacggttatgcgaaggcccgctggtactgcaaagaatgtgcggaatctgtcacggcctggggccgtgaatatatcgaatttgtgcgcaaagaactggaagaaaagttcggtttcaaggttctgtacattgatacggacggcctgtacgcaaccatcccgggtgctaaaccggaagaaattaagcgtaaggccctggaatttgtggaatacatcaacgcaaaactgccgggcctgctggaactggaatatgaaggcttctacgttcgcggctttttcgtcacgaagaaaaagtatgcgctgattgacgaagaaggcaaaatcattacccgtggtctggaaatcgttcgtcgc

SEQ ID NO: 592 - DNA, 489 bp, Thermococcus profundus
gattggagtgaaattgccaaagaaacccaggcacgtgttctggaagcactgctgaaagatggtaatgtcgaagaagcagtgagtattgttaaagaagtcacggaaaaactgtccaagtatgaagtcccgccggaaaaactggtgattcatgaacaaatcacccgcgaactgaaagattacaaggcgacgggcccgcacgtggcaattgctaaacgtctggcagcgcgtggcgttaagatccgtccgggtaccgttattagctatatcgtcctgaaaggctctggtcgtattggtgaccgcgccatcccgtttgatgaattcgacccggctaaacaccgctacgatgcggaatattacattgaaaatcaggtcctgccggctgtggaacgtatcctgaaagcgtttggctatcgtaaggaagatctgcgctaccagaaaacccgtcaagtgggcctgggtgcgtggctgaaaccgaagggtaaaaagtaa

SEQ ID NO: 593 - DNA, 483 bp, Thermococcus gammatolerans
gattggagtgaaattgccaaagaaacccaggcacgtgtcctggaagcaatcctgaaacatggtgatgtggaagaagcggttcgcattgtcaaagaagtgacggaaaagctgtcgaaatatgaagttccgccggaaaaactggtcatccatgaacaaattacccgcgatctgcgtgactacaaagccacgggtccgcacgtggcagttgcaaaacgtctggcagcccgtggcgtgaagattcgtccgggtaccgtgatcagttatattgttctgaaaggctccggtcgcatcggtgaccgtgctattccgtttgatgaattcgacccgacgaaacaccgttacgatgccgaatattacatcgaaaatcaggtcctgccggccgtggaacgcattctgaaagcatttggttatcgcaaggaagatctgcgttaccagaagaccaaacaagtcggcctgggtgcgtggctgaaagtgaaaaagtaa

SEQ ID NO: 594 - DNA, 489 bp, Thermococcus radiotolerans
gattggagtgaaattgccaaagaaacccaggcacgcgttctggaagcaatcctgcgtcatggtgacgtcgaagaagccgttcgcattgtcaaagatgtgacggaaaagctgtcgaaatatgaagtcccgccggaaaaactggtgatccatgaacaaattacccgtgaactgaaggattacaaagcgacgggcccgcacgttgcaattgctaaacgcctggcagcccgtggcatcaagattcgtccgggtaccgttatcagctatattgtcctgaaaggctctggtcgcatcggtgatcgtgctattccgtttgatgaattcgacccgacgaaacaccgttacgatgccgaatattacatcgaaaatcaggtgctgccggccgttgaacgcattctgaaagcatttggctataagaaagaagaactgcgctaccagaaaacccgtcaagtgggcctgggtgcgtggctgaagctgaaaggtaagaaataa

SEQ ID NO: 595 - DNA, 486 bp, Pyrococcus sp. NA2
gattggagtgaaattgccaaagaaacccaggcaaaggttctggaagcaattctgaaacatggtaacgtcgaagaagcggtcaagatcgtgaaagaagttaccgaaaaactgtcgaattatgaaattccggtcgaaaagctggtgatctacgaacaaattacgcgcccgctgaacgaatataaagccattggcccgcacgtggcagttgctaaacgtctggcggccaagggtatcaagattaaaccgggcatggtgattggttatgttgtcctgcgcggcgatggtccgatcagcaaacgtgcgatcgccatcgaagaattcgatggcaaaaagcataagtacgacgcagaatactacatcgaaaatcaggttctgccggccgtcgaacgtatcctgaaagcattcggttataagcgtgaagatctgcgctggcagaagaccaaacaagtgggcctgggtgcgtggctgaaagttaaaaagtcttaa

SEQ ID NO: 596 - DNA, 489 bp, Thermococcus gammatolerans
gattggagtgaaattgccaaagaaacccaggcacgcgtcctggaagcaatcctgaaagatggtgacgtggaagaagccgtccgtattgtgaaagaagttacggaaaaactgtccaaatatgaagttccgccggaaaaactggtcatccatgaacaaattacccgcgaactgaaagattacaaagcgacgggcccgcacgtcgcaatcgctaaacgtctggcggcgcgtggcgtgaaaattcgtccgggtaccgtgatctcatatattgttctgaaaggctcgggtcgtatcggtgaccgcgctattccgtttgatgaattcgacccgaaaaaacacaaatacgatgcggaatactacatcgaaaaccaggttctgccggccgtcgaacgtattctgcgcgcatttggctaccgtaaagaagatctgcgttatcaaaaaaccaaacaagtgggtctgggtgcgtggctgaaaccgaaaggtaaaaaataa

SEQ ID NO: 597 - DNA, 486 bp, Thermococcus celericrescens
gattggagtgaaattgccaaagaaacccaggcacgtgttctggaagcaattctgaaacatggtaacgtcgaagaagcggtcaaaatcgtgaaagaagttacggaaaaactgtctaactacgaaattccgccggaaaaactggccatctacgaacaaattacccgcccgctgcatgaatataaagcaatcggtccgcacgtcgcagtggcaaaacgtctggcagcacgcggcgttaaagtcaaaccgggtatggtcatcggctatattgtgctgcgtggtgatggcccgatcagcaaccgcgcaattctggctgaagaatacgatctgaaaaaacacaaatacgacgccgaatattacatcgaaaatcaggttctgccggctgtcctgcgtattctggaagcgtttggctatcgtaaagaagatctgcgctggcagaaaacccgtcaaacgggtctgacctcatggctgaatattaaaaaatcgtaa

SEQ ID NO: 598 - DNA, 489 bp, Pyrococcus glycovorans
gattggagtgaaattgccaaagaaacccaggcacgtgtgctggaagctctgctgaaagatggcaatgttgaagaagcggtttccattgtcaaagaagtgacggaaaagctgggtaaatatgaagtcccgccggaaaaactggtgatccatgaacaaattacccgcgaactgaaggattacaaagcgacgggcccgcacgttgctatcgcgaaacgtctggcagcgcgtggcgtgaagattcgtccgggtaccgttatcagctatattgtcctgaaaggctctggtcgtatcggtgaccgcgcgattccgtttgatgaattcgacccgacgaaacatcgctacgatgcagaatattacatcgaaaaccaggttctgccggctgtcgaacgtattctgaaagcgtttggctatcgtgccgaagatctgcgctaccagaaaacccgtcaagtgggcctgggtgtttggctgcaaccgaaaggtaagaaataa

SEQ ID NO: 599 - DNA, 486 bp, Pyrococcus furiosus
gattggagtgaaattgccaaagaaacccaggcaaaagttctggaagcaatcctgaaacatggtaatgtcgaagaagcagtgaaaattgtcaaggaagtgacggaaaaactgtcgaagtatgaaatcccgccggaaaaactggtgatctacgaacaaattacccgcccgctgcatgaatataaagcgattggcccgcacgtggcagttgctaaacgtctggcagcccgcggtgtcaaagtgcgtccgggcatggtgatcggttatattgttctgcgtggcgatggtccgatcagtaaacgcgcgattctggccgaagaatttgatccgcgcaaacacaagtacgacgccgaatattacatcgaaaaccaggtgctgccggctgttctgcgtattctggaagcgttcggctatcgtaaagaagatctgcgctggcagaaaaccaagcaaacgggtctgaccgcatggctgaatgtgaaaaagaaataa

SEQ ID NO: 600 - DNA, 45 bp, Artificial Sequence
  Synthetic
ctttaagaaggagatatacatatgattctggacgctgactatatt

SEQ ID NO: 601 - DNA, 41 bp, Artificial Sequence
  Synthetic
catacgctttacgcagcaggaaccattcaaccaggttaccg

SEQ ID NO: 602 - DNA, 52 bp, Artificial Sequence
  Synthetic
ctgctgcgtaaagcgtatgaacgcaacgaactggcaccgaataaaccgtccg

SEQ ID NO: 603 - DNA, 50 bp, Artificial Sequence
  Synthetic
gggtttctttggcaatttcactccaatcgcgacgcacaatttccagaccg

SEQ ID NO: 604 - DNA, 50 bp, Artificial Sequence
  Synthetic
tgaaattgccaaagaaacccaggcacgtgttctggaagcactgctgaaag

SEQ ID NO: 605 - DNA, 39 bp, Artificial Sequence
  Synthetic
gtggtggtgctcgagttactttttacccttcggtttcag

SEQ ID NO: 606 - DNA, 45 bp, Artificial Sequence
  Synthetic
aactttaagaaggagatatacatatgattctggatacggactata

SEQ ID NO: 607 - DNA, 43 bp, Artificial Sequence
  Synthetic
tcatacgctttacgcagcagaaaccattcgaccaggttacccg

SEQ ID NO: 608 - DNA, 51 bp, Artificial Sequence
  Synthetic
ctgctgcgtaaagcgtatgaacgcaacgaactggcgccgaataaaccggat

SEQ ID NO: 609 - DNA, 48 bp, Artificial Sequence
  Synthetic
tttctttggcaatttcactccaatcacggcgcacgatttccagaccgc

SEQ ID NO: 610 - DNA, 47 bp, Artificial Sequence
  Synthetic
gtgaaattgccaaagaaacccaggcacgtgtcctggaagcaatcctg

SEQ ID NO: 611 - DNA, 42 bp, Artificial Sequence
  Synthetic
gtggtggtggtgctcgagttactttttcactttcagccacgc

SEQ ID NO: 612 - DNA, 45 bp, Artificial Sequence
  Synthetic
tttaagaaggagatatacatatgattctggacacggactatatta

SEQ ID NO: 613 - DNA, 46 bp, Artificial Sequence
  Synthetic
gttcatacgctttacgcagcaggaaccattcaaccaggttacccgt

SEQ ID NO: 614 - DNA, 49 bp, Artificial Sequence
  Synthetic
gcgtaaagcgtatgaacgcaacgaaattgcgccgaataaaccggatgaa

SEQ ID NO: 615 - DNA, 47 bp, Artificial Sequence
  Synthetic
gtttctttggcaatttcactccaatcacggcgcacgatttccagacc

SEQ ID NO: 616 - DNA, 45 bp, Artificial Sequence
  Synthetic
tgaaattgccaaagaaacccaggcacgcgttctggaagcaatcct

SEQ ID NO: 617 - DNA, 43 bp, Artificial Sequence
  Synthetic
ggtggtggtggtgctcgagttatttcttacctttcagcttcag

SEQ ID NO: 618 - DNA, 44 bp, Artificial Sequence
  Synthetic
ttaagaaggagatatacatatgattctggatgctgattacatta

SEQ ID NO: 619 - DNA, 47 bp, Artificial Sequence
  Synthetic
ttgcgttcatacgctttacgcagcagataccattccaccagattacc

SEQ ID NO: 620 - DNA, 44 bp, Artificial Sequence
  Synthetic
agcgtatgaacgcaacgaactggcgccgaataaaccggatgaac

SEQ ID NO: 621 - DNA, 47 bp, Artificial Sequence
  Synthetic
tttctttggcaatttcactccaatcgcgacgcacgatttccagacca

SEQ ID NO: 622 - DNA, 44 bp, Artificial Sequence
  Synthetic
gagtgaaattgccaaagaaacccaggcaaaggttctggaagcaa

SEQ ID NO: 623 - DNA, 42 bp, Artificial Sequence
  Synthetic
ggtggtggtggtgctcgagttaagactttttaactttcagcc

SEQ ID NO: 624 - DNA, 43 bp, Artificial Sequence
  Synthetic
ttaagaaggagatatacatatgatcctggatgcggactacatt

SEQ ID NO: 625 - DNA, 43 bp, Artificial Sequence
  Synthetic
tcatacgctttacgcagcaggaaccattcgaccaggttaccgg

SEQ ID NO: 626 - DNA, 50 bp, Artificial Sequence
  Synthetic
tgcgtaaagcgtatgaacgcaacgaactggcgccgaataaaccgtcgggc

SEQ ID NO: 627 - DNA, 45 bp, Artificial Sequence
  Synthetic
ttctttggcaatttcactccaatcgcgacgcacgatttccagacc

SEQ ID NO: 628 - DNA, 52 bp, Artificial Sequence
  Synthetic
agtgaaattgccaaagaaacccaggcacgcgtcctggaagcaatcctgaaag

SEQ ID NO: 629 - DNA, 43 bp, Artificial Sequence
  Synthetic
ggtggtggtggtgctcgagttattttttacctttcggtttcag

SEQ ID NO: 630 - DNA, 47 bp, Artificial Sequence
  Synthetic
ctttaagaaggagatatacatatgatcctggacaccgattacattac

SEQ ID NO: 631 - DNA, 43 bp, Artificial Sequence
  Synthetic
ggtggtggtggtgctcgagttatttcttacctttcggttgcag

SEQ ID NO: 632 - DNA, 22 bp, Artificial Sequence
  Synthetic
ctgctgcgtaaagcgtatgaac

SEQ ID NO: 633 - DNA, 24 bp, Artificial Sequence
  Synthetic
ttcgttgcgttcatacgctttacg

SEQ ID NO: 634 - DNA, 25 bp, Artificial Sequence
  Synthetic
tgaaattgccaaagaaacccaggca

SEQ ID NO: 635 - DNA, 26 bp, Artificial Sequence
  Synthetic
gtttctttggcaatttcactccaatc

SEQ ID NO: 636 - DNA, 43 bp, Artificial Sequence
  Synthetic
tttaagaaggagatatacatatgatcctggacgcaaactacat

SEQ ID NO: 637 - DNA, 43 bp, Artificial Sequence
  Synthetic
tcatacgctttacgcagcagataccattccaccaggttaccgg

SEQ ID NO: 638 - DNA, 47 bp, Artificial Sequence
  Synthetic
gcgtaaagcgtatgaacgcaacgaactggcaccgaataaaccggatg

SEQ ID NO: 639 - DNA, 46 bp, Artificial Sequence
  Synthetic
tttctttggcaatttcactccaatcgcgacgaacgatttccagacc

SEQ ID NO: 640 - DNA, 46 bp, Artificial Sequence
  Synthetic
gtgaaattgccaaagaaacccaggcaaaagttctggaagcaatcct

SEQ ID NO: 641 - DNA, 40 bp, Artificial Sequence
  Synthetic
gtggtggtggtgctcgagttatttctttttcacattcagc

SEQ ID NO: 642 - DNA, 42 bp, Artificial Sequence
  Synthetic
tttaagaaggagatatacatatgatcctggacgtggactaca

SEQ ID NO: 643 - DNA, 40 bp, Artificial Sequence
  Synthetic
catacgctttacgcagcaggaaccattcaaccagattgcc

SEQ ID NO: 644 - DNA, 53 bp, Artificial Sequence
  Synthetic
tgctgcgtaaagcgtatgaacgcaacgaagtggcaccgaataaaccggatgaa

SEQ ID NO: 645 - DNA, 44 bp, Artificial Sequence
  Synthetic
ttctttggcaatttcactccaatcgcgacgaacaatttccaggc

SEQ ID NO: 646 - DNA, 54 bp, Artificial Sequence
  Synthetic
ggagtgaaattgccaaagaaacccaggcacgtgttctggaagcaattctgaaac

SEQ ID NO: 647 - DNA, 46 bp, Artificial Sequence
  Synthetic
tggtggtggtggtgctcgagttacgattttttaatattcagccatg

SEQ ID NO: 648 - DNA, 47 bp, Artificial Sequence
  Synthetic
gacgctcttccgatcttatggtaattgtgtgccagcmgccgcggtaa

SEQ ID NO: 649 - DNA, 48 bp, Artificial Sequence
  Synthetic
tgtgctcttccgatctagtcagtcagccggactachvgggtwtctaat

SEQ ID NO: 650 - DNA, 23 bp, Artificial Sequence
  Synthetic
cctcatttggggaggggttatct

SEQ ID NO: 651 - DNA, 24 bp, Artificial Sequence
  Synthetic
ggggcaccttctccaactcatact

SEQ ID NO: 652 - DNA, 24 bp, Artificial Sequence
  Synthetic
ggggcaccttctccaactcatact

SEQ ID NO: 653 - DNA, 24 bp, Artificial Sequence
  Synthetic
cctgaaacaaggttgtggcatagc

SEQ ID NO: 654 - DNA, 20 bp, Artificial Sequence
  Synthetic
atgaggcaagatatgagtgc

SEQ ID NO: 655 - DNA, 21 bp, Artificial Sequence
  Synthetic
aatctctggccagatgtgttc

SEQ ID NO: 656 - DNA, 20 bp, Artificial Sequence
  Synthetic
atgaggcaagatatgagtgc

SEQ ID NO: 657 - DNA, 25 bp, Artificial Sequence
  Synthetic
gttctagagtacaatgtgcacaatg

SEQ ID NO: 658 - DNA, 20 bp, Artificial Sequence
  Synthetic
atgaggcaagatatgagtgc

SEQ ID NO: 659 - DNA, 22 bp, Artificial Sequence
  Synthetic
tgaccaaactccatcttctctc

SEQ ID NO: 660 - DNA, 20 bp, Artificial Sequence
  Synthetic
atgaggcaagatatgagtgc

SEQ ID NO: 661 - DNA, 19 bp, Artificial Sequence
  Synthetic
atgacactgatccagggac

SEQ ID NO: 662 - DNA, 20 bp, Artificial Sequence
  Synthetic
atgaggcaagatatgagtgc

SEQ ID NO: 663 - DNA, 24 bp, Artificial Sequence
  Synthetic
ttgccatgtaacatacttgtacac

SEQ ID NO: 664 - DNA, 20 bp, Artificial Sequence
  Synthetic
atgaggcaagatatgagtgc

SEQ ID NO: 665 - DNA, 21 bp, Artificial Sequence
  Synthetic
tggctcatgtatcacacaatg

SEQ ID NO: 666 - DNA, 20 bp, Artificial Sequence
  Synthetic
atgaggcaagatatgagtgc

SEQ ID NO: 667 - DNA, 20 bp, Artificial Sequence
  Synthetic
acctaaaccttgcaattggg

SEQ ID NO: 668 - DNA, 20 bp, Artificial Sequence
  Synthetic
atgaggcaagatatgagtgc

SEQ ID NO: 669 - DNA, 19 bp, Artificial Sequence
  Synthetic
ttggctattcttgttgctg

1. A chimera DNA polymerase with DNA replication activity, comprising:
a first domain, encoded by a nucleotide sequence selected from nucleotide sequences denoted as SEQ ID NOs: 576 to 583 or a nucleotide sequence that shares a sequence identity of at least 70%, 75%, 80%, 85%, 90%, 95%, 97%, 98% or 99% with one of the nucleotide sequences denoted as SEQ ID NOs: 576 to 583;
a second domain, encoded by a nucleotide sequence selected from nucleotide sequences denoted as SEQ ID NOs: 584 to 591 or a nucleotide sequence that shares a sequence identity of at least 70%, 75%, 80%, 85%, 90%, 95%, 97%, 98% or 99% with one of the nucleotide sequences denoted as SEQ ID NOs: 584 to 591; and
a third domain, encoded by a nucleotide sequence selected from nucleotide sequences denoted as SEQ ID NOs: 592 to 599 or a nucleotide sequence that shares a sequence identity of at least 70%, 75%, 80%, 85%, 90%, 95%, 97%, 98% or 99% with one of the nucleotide sequences denoted as SEQ ID NOs: 592 to 599.

2. The chimera DNA polymerase according to claim 1, wherein when compared with reference polypeptide denoted as SEQ ID NO: 575, an amino acid sequence of the DNA polymerase comprises one or more amino acid substitutions corresponding to amino acids at the following positions:
5, 6, 11, 15, 16, 18, 22, 24, 25, 28, 30, 33, 35, 36, 38, 43, 47, 49, 50, 51, 52, 54, 56, 57, 61, 62, 64, 65, 66, 67, 68, 72, 73, 80, 81, 84, 88, 89, 90, 94, 96, 99, 100, 102, 104, 107, 110, 126, 127, 132, 136, 137, 138, 139, 140, 153, 154, 158, 165, 166, 167, 169, 176, 180, 182, 183, 185, 186, 188, 189, 193, 194, 195, 196, 197, 198, 199, 206, 210, 213, 216, 217, 220, 223, 226, 228, 230, 231, 232, 233, 236, 238, 241, 244, 247, 248, 251, 252, 261, 262, 265, 268, 282, 285, 286, 292, 293, 296, 297, 301, 302, 303, 304, 310, 318, 320, 324, 327, 331, 334, 337, 340, 341, 356, 367, 373, 374, 375, 377, 378, 379, 383, 384, 386, 395, 399, 400, 401, 403, 406, 407, 408, 409, 410, 424, 426, 430, 434, 437, 439, 441, 446, 447, 455, 456, 459, 463, 466, 467, 470, 471, 472, 475, 477, 478, 479, 485, 494, 499, 502, 508, 520, 524, 525, 526, 527, 529, 532, 533, 540, 545, 546, 552, 553, 554, 556, 557, 559, 560, 562, 565, 566, 570, 575, 585, 588, 597, 604, 605, 626, 631, 633, 634, 636, 642, 646, 652, 653, 656, 658, 662, 664, 670, 672, 673, 677, 683, 690, 692, 694, 695, 698, 701, 703, 706, 708, 710, 712, 713, 717, 718, 719, 721, 723, 724, 727, 743, 747, 752, 753, 755, 758, 762, 764, 767, 768, 771, 772, 774, and 775,
where the positions are defined with reference to SEQ ID NO: 575.

3. The chimera DNA polymerase according to claim 2, wherein the amino acid substitution is selected from one or more of the following:
VST/A, D6N, E11N/D, V15I, I16V, I18V/L, E22N, G24K/E, K25R/E, I28V, H30Y, T33Y/E/N, R35E, P36E/H/M, 138F, R43K, K47Q/K/A, E49D, E50S, I51V, K52R, I54V, G56S/A, E57K/G, K61T/R, I62V, R64K/T, I65V, V66T/I/K, D67K/R, V68A, E72Q/K, K73R, I80V, T81E, K84R, E88T, H89R, P90F, P94E/Q, I96M, K99E/R, V100I, E102S/R/A, P104S, V107I, F110Y, L126I, I127V, E132N/D, K136T, I137F/L/M, L138M, A139S, F140V, G153A, K154E/T, I158L, E165G, N166S/G/E, E167G, K169R, I176V, Y180F, E182D, V183A, S185A, S186N/T, R188K, E189D, R193A, F194L, L195I, R196K, I197V, I198V, R199K, I206L, N210D, S213N/D, F216L, P217A, A220L/V/K, A223C, L226F/I, I228M/V, L230F, T231P/I, I232L, G233R, G236N, E238K, I241M, I244L/M, M247S/R, T248L/F, E251D, V252I, Y261F, H262P, T265L/R, I268V, I282V, K285T/R, P286Q, A292P, D293H/E, A296T, K297Q/T/E, S301T, G302N, E303K, N304G, K310R, A318V, Y320F, K324R, F327L, I331A, S334A, V337I, P340S, L341F, F356Y, V367L, S373D, E374G/K, E375K/R, Y377L, Q378V/A/E/D, R379E, E383G/N, S384G, T386A/E, KR395R, E399D, N400G, I401L, Y403S, F406Y, R407K/M/H, A408S/D/F/G/P/R/T, L409S/D/F/G/P/R/T/A, Y410S/D/F/G/P/R/T/A, L424F, L426K/R, K430G/M/R, 1434E/T/V, Q437E, G439K, K441R, I446V/F, P447Q, G455K, H456N/A/S/R/D, E459D, K463E, T466R/K, K467R, E470A, T471S, Q472I/V/K, I475L/V, K477R, I478R/K, L479M, K485R, F494Y, G499A, K502R, K508R, K520D/Q/E, L524M/T/F, V525T/S, W526R/I, K527H/R, L529I, K532R, F533Y/R, I540A, L545V/F/I, Y546V/I/A/T, G552E/A, E553K/D, S554N/P/D, E556T, I557V, K559R, K560R, L562K/M, V565L, K566N/E/D, S570A, L575A, K585V/R/T, F588L, V597L, I604V/T, I605V/T, R626K, I631L, K633R, H634D, D636N, R642K/S, E646D, A652G/S, N653K, I656V, P658V, A662V, Y664H, P670E/D, H672N/K/R, E673D, I677T, V683I, K690R, V692I, I694V, R695K, M698T, G701S, I703V, R706K, D708S, P710R, S712G, N713K/D, L717A/P, A718I/F, E719D, Y721F, P723G/L, K724T/A/R, K727R, L743E, E747R/K, R752K, K753R/A, D755E, Y758W, R762K, V764T, G767T, S768V/A, N771Q/K, I772L/V/P, K774G, and S775K.

4.-5. (canceled)

6. The chimera DNA polymerase according to claim 1, wherein the DNA polymerase shares a sequence identity of at least 70%, 75%, 80%, 85%, 90%, 95%, 97%, 98% or 99% with SEQ ID NO: 575.

7. The chimera DNA polymerase according to claim 1, comprising an amino acid sequence, wherein the amino acid sequence shares a sequence identity of at least 70%, at least 75%, at least 80%, at least 85%, at least 90%, at least 95%, at least 97%, at least 98%, at least 99%, or 100% with any one of the amino acid sequences denoted as SEQ ID NOs: 1 to 574 .

8. (canceled)

9. A nucleic acid, comprising a sequence encoding the chimera DNA polymerase according to claim 1.

10. A nucleic acid construct, comprising the nucleic acid according to claim 9.

11. A host cell, comprising the nucleic acid according to claim 9.

12. A kit, comprising the chimera DNA polymerase according to claim 1.

13. A composition, comprising the chimera DNA polymerase according to claim 1.

14.-15. (canceled)

16. A method of amplifying nucleic acid, comprising amplifying a DNA sequence by using the chimera DNA polymerase of claim 1.

17. A method for improving a property of a DNA polymerase, wherein the method comprises:
replacing a corresponding domain of a to-be-improved DNA polymerase with one or more domains encoded by one nucleotide sequence selected from nucleotide sequences denoted as SEQ ID NOs: 576 to 599.

18. A method for improving a property of a DNA polymerase, wherein the method comprises:
introducing, into a to-be-improved DNA polymerase, one or more amino acid substitutions selected from the following:
VST/A, D6N, E11N/D, V15I, I16V, I18V/L, E22N, G24K/E, K25R/E, I28V, H30Y, T33Y/E/N, R35E, P36E/H/M, I38F, R43K, K47Q/K/A, E49D, E50S, I51V, K52R, I54V, G56S/A, E57K/G, K61T/R, I62V, R64K/T, I65V, V66T/I/K, D67K/R, V68A, E72Q/K, K73R, I80V, T81E, K84R, E88T, H89R, P90F, P94E/Q, I96M, K99E/R, V100I, E102S/R/A, P104S, V107I, F110Y, L126I, I127V, E132N/D, K136T, I137F/L/M, L138M, A139S, F140V, G153A, K154E/T, I158L, E165G, N166S/G/E, E167G, K169R, I176V, Y180F, E182D, V183A, S185A, S186N/T, R188K, E189D, R193A, F194L, L195I, R196K, I197V, 1198V, R199K, I206L, N210D, S213N/D, F216L, P217A, A220L/V/K, A223C, L226F/I, I228M/V, L230F, T231P/I, I232L, G233R, G236N, E238K, I241M, I244L/M, M247S/R, T248L/F, E251D, V252I, Y261F, H262P, T265L/R, I268V, I282V, K285T/R, P286Q, A292P, D293H/E, A296T, K297Q/T/E, S301T, G302N, E303K, N304G, K310R, A318V, Y320F, K324R, F327L, I331A, S334A, V337I, P340S, L341F, F356Y, V367L, S373D, E374G/K, E375K/R, Y377L, Q378V/A/E/D, R379E, E383G/N, S384G, T386A/E, KR395R, E399D, N400G, I401L, Y403S, F406Y, R407K/M/H, A408S/D/F/G/P/R/T, L409S/D/F/G/P/R/T/A, Y410S/D/F/G/P/R/T/A, L424F, L426K/R, K430G/M/R, 1434E/T/V, Q437E, G439K, K441R, I446V/F, P447Q, G455K, H456N/A/S/R/D, E459D, K463E, T466R/K, K467R, E470A, T471S, Q472I/V/K, I475L/V, K477R, 1478R/K, L479M, K485R, F494Y, G499A, K502R, K508R, K520D/Q/E, L524M/T/F, V525T/S, W526R/I, K527H/R, L529I, K532R, F533Y/R, I540A, L545V/F/I, Y546V/I/A/T, G552E/A, E553K/D, S554N/P/D, E556T, I557V, K559R, K560R, L562K/M, V565L, K566N/E/D, S570A, L575A, K585V/R/T, F588L, V597L, I604V/T, I605V/T, R626K, I631L, K633R, H634D, D636N, R642K/S, E646D, A652G/S, N653K, I656V, P658V, A662V, Y664H, P670E/D, H672N/K/R, E673D, I677T, V683I, K690R, V6921, I694V, R695K, M698T, G701S, I703V, R706K, D708S, P710R, S712G, N713K/D, L717A/P, A718I/F, E719D, Y721F, P723G/L, K724T/A/R, K727R, L743E, E747R/K, R752K, K753R/A, D755E, Y758W, R762K, V764T, G767T, S768V/A, N771Q/K, I772L/V/P, K774G, and S775K,
where the positions are defined with reference to SEQ ID NO: 575.

19. The method according to claim 178, wherein the improved property is selected from one or more of the following: better Mg²⁺ tolerance, better SDS tolerance, better TE tolerance, and higher long fragment amplification capability.

20. A host cell, comprising the nucleic acid construct according to claim 10.

21. A method of amplifying nucleic acid, comprising amplifying a DNA sequence by using the kit of claim 12.

22. A method of amplifying nucleic acid, comprising amplifying a DNA sequence by using the composition of claim 13.

23. The method according to claim 18, wherein the improved property is selected from one or more of the following: better Mg²⁺ tolerance, better SDS tolerance, better TE tolerance, and higher long fragment amplification capability.
